(19) United States
(12) Patent Application Publication
(10) Pub. No.: US 2024/0240165 A1
(43) Pub. Date: Jul. 18, 2024

(54) SYNTHETIC CAS PROTEINS

(71) Applicant: ASOCIACIÓN CENTRO DE INVESTIGACIÓN COOPERATIVA EN NANOCIENCIAS "CIC NANOGUNE", San Sebastian, Guipuzcoa (ES)

(72) Inventors: Raúl PEREZ-JIMENEZ, San Sebastian (ES); Borja ALONSO-LERMA, San Sebastian (ES)

(73) Assignee: ASOCIACIÓN CENTRO DE INVESTIGACIÓN COOPERATIVA EN NANOCIENCIAS "CIC NANOGUNE", San Sebastian, Guipuzcoa (ES)

(21) Appl. No.: 18/563,699

(22) PCT Filed: May 25, 2022
(86) PCT No.: PCT/EP2022/064307

§ 371 Date: Nov. 22, 2023

(30) Foreign Application Priority Data
May 25, 2021 (EP) 21382474.1
May 28, 2021 (GB) 2107671.6
Mar. 30, 2022 (EP) 22165690.3

(51) Int. Cl. C12N 9/22; C12N 15/11; C12N 15/90; G16B 10/00

(52) U.S. Cl. CPC C12N 9/22; C12N 15/11; C12N 15/907; G16B 10/00; C12N 2310/20; C12N 2800/80

(57) ABSTRACT

The use of phylogenetic ancestral sequence reconstruction to generate new Cas enzymes with improved capabilities. By this strategy, ancestral variants of Cas9 proteins of currently existing species have been obtained, which can exhibit nickase activity separate from endonuclease activity, and relaxed, if not abolished, PAM requirement. Ability to use tracrRNA components of Cas9 gRNAs from a wide variety of existing bacterial species has also been observed.

### FIELD OF THE INVENTION

[0001] The present invention relates to methods of obtaining Cas proteins suitable for use as single effector CRISPR system-associated nucleases, i.e., class II Cas proteins, which are not isolatable from recognized microbial sources. To do so, the invention provides reconstructed ancestral sequences derived by evolutionary tracing from a phylogenetic tree compiled using Cas protein sequences of existing species. Such reconstructed proteins are thus synthetic proteins in the sense that they are not isolatable from modern day sources but can be utilized in the same way as naturally-occurring Cas proteins in class II CRISPR systems which are now widely used for gene-editing. The Inventors have coined the term “ancestral Cas” or “AnCas” for such reconstructed sequences. This route to novel Cas proteins has been found to beneficially add to the diversity of Cas proteins available for gene-editing as regards useful properties, including relaxation of the protospacer adjacent motif (PAM) requirement of type II proteins compared with the most commonly used type II Cas protein, Streptococcus pyogenes (SpyCas9).

### BACKGROUND OF THE INVENTION

[0002] The native CRISPR-Cas systems provide immunity to prokaryotes responding to invading nucleic acids from infectious genetic elements. Cas proteins guided by CRISPR-encoded RNA molecules (gRNAs) recognize specific regions of the foreign genome and cleave it for inactivation. Since the first CRISPR-Cas9 system was repurposed as a gene-editing tool, such CRISPR systems, and other class II CRISPR-Cas systems, have revolutionized the field of genome engineering. Nevertheless, CRISPR is not ready for implementation as a therapeutic tool due to limitations such as generation of unwanted mutations at similar loci, production of multiple alleles leading to genetic mosaicism, low efficiency and possible induction in the host of an immune response. A study found that blood samples from human donors showed a high percentage with antibodies to SpyCas9 and Cas9 derived from Staphylococcus aureus (Charlesworth et al., 2019. Nature Med. 25(2):249-254).

[0003] The number and diversity of known CRISPR-Cas systems has dramatically increased since the first disclosure of in vitro DNA-editing studies with a CRISPR-Cas9 system in 2012. The distinguishing feature of class II systems is that the nuclease effector of the complex consists of a single, multi-domain protein, as exemplified by Cas9 utilizing type II systems. Target recognition is accomplished with structural non-coding RNAs that, through base-pairing, guide the Cas protein to its target nucleic acid sequence site for endonuclease cleavage action. In addition to guide RNA (gRNA) recognition, a sequence motif, termed the protospacer adjacent motif (PAM), is required for the initiation of Cas-guide RNA target binding and cleavage. This is important for distinguishing self from non-self in native anti-viral defense systems. However, it is less helpful for some desired applications arising from repurposing of class II CRISPR-Cas systems as a genetic tool.

[0004] Bacterial Cas9 proteins were the first studied Cas proteins and Spycas9 remains the most extensively studied Cas9 and much used for gene-editing. Such proteins are characterized as type II Cas9 proteins by containing two nuclease domains, both an HNH-like and RuvC-like nuclease domain, and associated catalytic residues required for double-strand DNA endonuclease cleavage resulting in blunt ends. Since 2012, Cas endonucleases have been isolated from many different bacteria and archaea. The latest classification of class II Cas nucleases includes 3 types and 17 sub-types as reviewed in Makarova et al., 2020 (Nature Rev Microbiol. 18(2):67-83). Thus, class II CRISPR-Cas systems currently include types II, V and VI systems with type VI systems being the first and so far, only variety of CRISPR-Cas systems that exclusively cleave RNA.

[0005] The type V systems fundamentally differ from type II systems by the domain architecture of their effector Cas proteins. Whilst type II effectors (Cas9 nucleases) contain two nuclease domains that are each responsible for the cleavage of one strand of the target DNA, with the HNH nuclease inserted inside the RuvC-like nuclease domain sequence, the type V effectors (Cas12 nucleases) by contrast only contain a RuvC-like domain that cleaves both strands. Type VI effectors (Cas13 nucleases) are unrelated to the effectors of type II and type V, as they contain two HEPN domains and apparently target transcripts of invading DNA genomes in their native environment. Cas13 proteins also display collateral, non-specific RNase activity that is triggered by target recognition.

[0006] Amongst type V variants, a number with smaller RuvC-like domains are currently classified as sub-type V-U effectors. These show high sequence similarity to TnpB proteins (predicted RuvC-like nucleases) encoded by IS605-like transposons and are thought to be intermediates on the evolutionary path from TnpB to fully fledged type V effectors. CRISPR-Cas systems evolved from different groups of TnpB on multiple, independent occasions, as has been shown by phylogenetic analysis of the TnpB family. Analysis of the interference activity of four subtype V-U effectors has more recently resulted in one such variant being upgraded to a separate subtype V-F. The subtype V-F effector, Cas12f (originally denoted Cas14), has been shown to cleave single-stranded DNA (ssDNA). However, phylogenetic analysis of type V Cas enzymes has only been used as a means of classifying isolated naturally-occurring such nucleases with a single RuvC-like nuclease domain.

[0007] Despite the diversity of known naturally-occurring class II CRISPR-Cas systems, recently supplemented by the extensive mining of natural sources for CRISPR-Cas9 orthologs by Gasiunas et al., 2020 (Nature Com. 11(1):5512), still further diversity is desired to ease various gene-modification desires, especially in the therapeutic field. SpyCas9 has been widely-adapted for genome editing and as a fusion enzyme for transcriptional control, epigenome-editing, base-editing and prime-editing. Despite its versatility, SpyCas9 is still limited for certain such applications by its “NGG” PAM recognition requirement. Attempts have been made to relax this requirement not only by mining for new orthologs, but by utilizing directed evolution techniques, e.g., random mutagenesis of the PAM interaction domain (PID) with selection, and by structure-guided mutagenesis as reviewed by Collias & Beisel, 2021 (Nature Com. 12(1): 555). Walton et al., 2020 (Science. 368(6488):290-296), by application of structure-guided mutagenesis, achieved the SpRY nuclease variant which recognizes a consensus NR PAM sequence (with R being A or G) and, with lesser efficacy, a RY PAM sequence (with Y being C or T). This is the most relaxed PAM requirement reported for a Cas9 variant to date.

### SUMMARY OF INVENTION

[0008] As indicated above, the inventors in this instance have adopted a novel approach to expand the available toolset of RNA-programmable CRISPR-associated nucleases. This approach referred to as Phylogenetic Ancestral Sequence Reconstruction has been used to generate variants of bacterial Cas9 predicted to have been present in organisms that lived billions of years ago. Ancestral enzymes have greater stability and efficiency, exhibit chemical promiscuity and are more versatile than their modern descendants. Furthermore, a benefit of looking to ancestral enzymes for gene therapy is that the host's pre-existing immunity against these proteins can be potentially dismissed. The inventors have designed and tested, for example, ancestral Firmicutes, Bacilli and Streptococci Cas9 forms. They show high level of expression, non-specific tracrRNA binding, and high efficiency gene editing in cells of the human HEK293T cell line.

[0009] Whilst the invention has been founded on use of phylogenetic information for a diverse population of Cas9 enzymes from the phylum Firmicutes and within the bacterial classes of Clostridia and Bacilli, including many species of Streptococcus encompassing for example, Streptococcus pyogenes, plus some Cas9 sequences from the phylum of Actinobacteria, it will be appreciated that the same approach may be employed to obtain ancestral versions of Cas single nuclease effectors of other classification types, e.g. an ancestral Type V or Type VI Cas enzyme. The ancestral version may be of the same type but of a different sub-type. It may be assigned a novel sub-type from any sub-type of the current classification as set out in Makarova et al. ibid.

[0010] Thus, in one aspect the present invention provides a method of phylogenetic ancestral reconstruction for obtaining a functional, single effector Cas protein nuclease (commonly referred to as Class II Cas protein), e.g., a functional Cas9 variant, comprising:
[0011] (a) providing a phylogenetic tree from sequence analysis of a population of Cas sequences comprising naturally-occurring single effector Cas nuclease sequences of the same classification type, e.g., a population of Type II Cas9 sequences, and derived from a plurality of existing species, preferably of more than one genus, still more preferably of more than one class and possibly spanning more than one phylum;
[0012] (b) selecting an ancestral variant sequence by tracing back an evolutionary route from the phylogenetic tree, wherein the highest probability amino acid for each amino acid of the selected ancestral variant is determined, and
[0013] (c) producing said variant, wherein said variant is capable of exhibiting Cas protein endonuclease and/or nickase activity.

[0014] It will be appreciated that the starting population of Cas sequences for provision of the phylogenetic tree of step (a) may include one or more predetermined ancestral variant sequences obtained by prior application of such a method.

[0015] Computer-implemented methods for compiling phylogenetic trees by protein sequence alignment of protein orthologs are well-known. Described further herein is use of computer-implemented methods whereby evolutionary routes can be compiled enabling ancestral variants of naturally-occurring Cas proteins to be predicted and reconstructed from many millions of years ago. The inventors report for the first time the “resurrection” of Cas9 enzymes as old as 2-3 Bys showing high production level as well as high efficiency of targeting and editing of DNA.

[0016] In effect, computer-implementation of step (b) may comprise:
[0017] (i) compiling sequences of ancestral variants which are each just ancestral variants for a plurality of species' sequences forming a proportion of the sequences of the same genus, e.g., the Streptococcus genus, preferably further
[0018] (ii) using the sequences attained in (i) to compile one or more ancestor variant sequences which are assigned as a genus ancestor, e.g., an ancestral sequence which is a compiled ancestral sequence just for all or at least a large proportion of available Streptococci Cas sequences and/or one or more ancestor variant sequences which are assigned as a class ancestor able to trace back to sequences of starting species of a plurality of genera, e.g. an ancestral sequence which is compiled as an ancestor sequence just for all or at least a large proportion of available Bacilli sequences spanning a plurality of genera, preferably further
[0019] (iii) compiling at least one inter-class ancestor sequence able to trace back to starting species of more than one class. Such an ancestral variant may be a preferred selection for production, but a variety of ancestral variants thus compiled may be found to have beneficial properties.

[0020] One such evolutionary route map is shown in FIG. 1 leading to compilation of such an inter-class ancestral variant sequence (or common phylum ancestor sequence) starting from a population of Cas9 sequences as noted above, including Cas9 sequences of existing bacterial species of both the Bacilli and Clostridia classes. It will be noted that the starting sequences of bacterial species of the Bacillus class include many known Cas9 sequences of Streptococci including SpyCas9 (28 in number). Use of such a diverse population of starting sequences, including Cas9 sequences from a diverse range of bacteria belonging to the Bacillus class, including a substantial number of existing Streptococci Cas9 sequences, e.g., 25 or more, will be recognized as highly desirable for such evolutionary map construction.

[0021] The production of step (c) will normally be by providing a nucleic acid sequence for expression in a suitable host cell, e.g., E. coli. The coding sequence may be codon-optimized.

[0022] The exemplification illustrates how desired cleavage activity may be tested for even in the absence of knowledge of any PAM requirement. Desirably where such activity is observed initially by in vitro test, it will be maintained in further testing in human cells. For example, where the selected ancestral variant has been attained starting from a population of Cas9 sequences from a plurality of existing species, the activity of the selected ancestral variant may be tested under conditions in vitro and in a human cell line known to be suitable for endonuclease activity of a Cas9 sequence from an existing species, e.g., SpyCas9. For such testing in human cells, human codon-optimized sequences for the Cas enzymes will desirably be employed in expression vectors suitable for Cas protein expression in the chosen cells.

[0023] Where the initially selected variant is a Cas endonuclease, it may be subsequently converted to a nickase or converted to a deadCas (dcas) in known manner for amino acid mutagenesis of relevant nuclease catalytic sites and/or fused to a non-nuclease effector. For example, it is well known how to inactivate one or both nuclease sites of a Cas9 endonuclease and link a Cas9 enzyme to another effector, e.g., an enzyme for base-editing or prime-editing or a transcriptional or epigenetic regulator.

[0024] Also encompassed by the invention are novel Cas enzymes obtained by an ancestral reconstruction method as described above and nucleic acid sequences encoding the same, e.g., provided in an expression vector for expression in a host cell. Within the scope of the present invention, the Cas nucleases or Cas nuclease variants described herein are hereby interchangeably referred to as “ancestral Cas” or “AnCas”.

[0025] By ancestral sequence reconstruction as now taught, of particular interest is the attainment of AnCas variant enzymes which, compared to SpyCas9 under conditions for linearization of a dsDNA plasmid target by SpyCas as a reference nuclease, will exhibit time separable nickase and endonuclease activity reflected by a higher ratio of nicked template to linearized template. That is to say that the AnCas variant enzymes described herein may produce a greater percentage of nicked plasmid DNA template compared to SpyCas9 under the same conditions or may produce a lower percentage of double stranded breaks in a plasmid DNA template compared to SpyCas9 under the same conditions. Indeed, as is well-known, SpyCas9 is not recognized as a nickase enzyme under commonly employed conditions of use except when one nuclease site is removed. In contrast, now provided are AnCas enzymes obtained as Cas9 ancestral variants having a ratio of linearized DNA plasmid template to nicked DNA plasmid template of between at least 2.3:1 to at least 1:4 under conditions whereby SpyCas9 results in a ratio of linearized DNA plasmid target to nicked DNA plasmid template of at least 4:1. That is to say after 30 minutes AnCas enzymes obtained in accordance with the invention such as LFCA, LBCA and LSCA may nick at least 30% of the DNA template up to at least 70%, e.g. about 80%, of the DNA template whereas under the same conditions SpyCas9 nicks about 10% of the DNA template in the same amount of time (see FIG. 11). Thus, in other words, the AnCas nuclease has a higher nick rate and lower linearization rate on a dsDNA plasmid target under conditions whereby SpyCas9 results in substantially exclusively linearization or almost exclusively linearization while the AnCas nuclease and variants of interest provide under the same conditions observable nicked target.

[0026] This may be combined in the AnCas enzyme with relaxed PAM requirement compared with SpyCas9; indeed, no observable 3 nucleotide or up to 7 nucleotide specific PAM requirement under conditions where SpyCas9 maintains its recognized 3 nucleotide PAM requirement of NGG, e.g., TGG, to exhibit significant DNA cleavage activity.

[0027] Moreover, such relaxed PAM requirement has been observed to be combined with highly flexible gRNA use. Thus, as reported herein an AnCas has been found to be capable of utilizing a sgRNA with a Cas9 tracrRNA component corresponding to that of any of a wide variety of existing bacterial species possessing a Cas9 ortholog. Thus, the targeting sequence may be varied but the sgRNA otherwise resembles a sgRNA as may be employed with a plurality of known Cas9 orthologs. Such non-specific tracrRNA use is not a property which has been reported previously for any known Cas9 ortholog.

[0028] Such beneficial characteristics have also been attained in combination with ability to cleave single-stranded DNA and single-stranded RNA. Again, this is a distinguishing characteristic from SpyCas9.

[0029] By way of example of such an AnCas, now provided is a highly advantageous ancestral of existing Firmicute Cas9 enzymes including SpyCas9, designated by the inventors the Last Firmicute Common Ancestor (LFCA); see FIG. 1, node 63 of FIG. 9 and SEQ ID NO: 1.

LFCA
SEQ ID NO: 1
MKKDYSIGLDIGTNSVGWAVTDDNYNLVRKKMKVLGNTDK
KSIGKALWGVRLFDAAETAEERRMHRTTRRRYTRRRQRID
LLQEIFQEEISKVDPSFFIRLNESRLHPEDKTDDRHPLFG
DNETDKDYHKQYPTIYHLRKHLMESDEKHDIRLVYLALHH
IIKYRGHFLIEGDLNSENTDVEELFKQLVQVENDTFEEEH
LSEEAIDIEEILTDKKSRSTRAKEVVKLFGSEKKQACISA
LIKLIVGLKGNLKKVFGDAEDTSIHFSKDNYEEDLEAIRD
IIPDEYADLFEAIKALYDAIVLSGILGGSTSNTKAKVSAS
MIARYEQHQKDLKQLKQFVKEHLPEKYNEIFSDNTKNGYS
AYIEGGTSQEDFYKYLKKILKELEEAEYLLEEIENENFLP
KQRTSDNGVIPYQIHLEELRAILKNOGKYYPFLKENAEKI
ESILTFRIPYYVGPLARGNGRFAWMIRKKDGKITPWNFDE
VVDKEKSAEEFIERMTNNCTYLPGENVLPKNSLLYEKFTV
LNELNNVRLTTDKGKTRRFSAEQKQEIFDDLFRKNRKVTK
KKLEDYLKREYEEFDSADISGIDGEFKSSLGSYHDFCKIV
VKGNSLDEEDYKDIIEEIIKWLTVFEDRKMLRRRLEKYSE
ILTEEQIKKICKRHYTGWGRLSRKLLTGIRDKETGKSIID
VLRETDSSNRNFMQLLSDEDLSFKEEIEQANAEAEGENLH
EIVEDLPGSPAIKRGILQALKIVDEIVKVMGHEPKNIFVE
MARENQKTGRGRRSTKKRLKRLQEALKNLGSNLLKELPRD
DNELRNDRLFLYYTQMGKCMYTGEPIDLDDLSNYDIDHII
PQSFIKDDSLDNRVLVSREENARKTDNFPSPEIRRKMKSF
WQMLLKAGLISKKKFDRLTRADRGDFTDDELAGFIARQLV
ETRQITKHVATLLKQRYPTEKDEEDKTIRNAKIVSVKANL
VSEFRQDFGLYKCREVNDYHHAHDAYLNAVVGNALLKKYP
QLAAEFIKGDYRKNNAREENKANAKMHFYSNIMNSFTSDV
KIADETGEIVWDKEKDIATVRKVMNYHQVLITRKVEEEKG
GFFDQTILSKGNSKKLIPLKKNLDPEKYGGYNSPTVAYSV
LVEYDIEKGKKKKLKTVKQLVGIPIRERAKLEKNPIKYLE
KKGYQNPKVDLLIKIPKNSLFELDGGRRRILAAAKELKNA
NQLVLPAEEYTLLDKVAKIIKKNNSESIEYVEEHLSEFDE
LLESLIDYSPKLALQDKNLEKIKEAFEQLNLADKKEVAKE
IINLLHCTATTANAALKFLGGSKNRMRYTSIKELLNASLI
HQSITGLYETRIDLGKLGED

[0030] By way of further example, also now provided is a highly advantageous ancestral variant of existing Bacilli Cas9 enzymes including SpyCas9, designated by the inventors the Last Bacilli Common Ancestor (LBCA); see FIG. 1, see node 70 of FIG. 9 and SEQ ID NO: 2. This AnCas illustrates a class ancestral variant being evolutionary traceable to the Cas sequences of a broad range of modern-day bacterial species of the Bacilli class, including Streptococci species.

LBCA
SEQ ID NO: 2
MKKDYSIGLDIGTNSVGWAVITDDYKVVRKKMKVLGNTDK
KSIKKNLWGVRLFDSGETAEDTRLKRTTRRRYTRRRNRIC
YLQEIFQEEMNKVDDSFFHRLDESFLVPEDKKYDRHPIFG
NLEEEVAYHEQYPTIYHLRKHLADSSEKADLRLVYLALAH
IIKYRGHFLIEGDLNTENTDVEELFKQFVQVYNQTFEEQH
LSDETIDVEEILTEKVSKSRRAENVLKLFPNEKKNGLFGQ
LIKLIVGLQGNFKKVFDLSEDAKLQFSKDTYEEDLENLLA
MIGDEYADLFLAAKNLYDAILLSGILTTTDNNTKAKLSAS
MIKRYEEHQKDLAQLKQFIKEHLPDKYNEIFSDSSKNGYA
GYIEGKTSQEDFYKYLKKILSKIDGAEYFLEKIEQENFLR
KQRTFDNGVIPHQIHLEELRAILRRQGKYYPFLKENQEKI
EQILTFRIPYYVGPLARGNSRFAWLTRKSDEPITPWNFDE
VVDKEKSAEAFIERMTNYDTYLPNEKVLPKHSLLYEKFTV
FNELTKVRYVTDRGKTQNFSAEQKQEIFDDLFKKNRKVTK
KKLENYLKKEYEYFDSPDITGIEDEFNASLGTYHDLLKIL
KSKDFLDDEENEEILEDIVKILTVFEDRKMIRKRLEKYSD
ILTEEQLKKLERRHYTGWGRLSRKLINGIRDKQSGKTILD
YLIDDDSSNRNFMQLINDDNLSFKEEIEKAQVIGETENLH
EIVQDLPGSPAIKKGILQSLKIVDELVKVMGHEPKNIVVE
MARENQTTSRGRRNSKQRLKRLEEALKNLGSNLLKEHPVD
NQQLONDRLYLYYLONGKDMYTGQELDIDNLSNYDIDHII
PQSFIKDNSIDNRVLVSSEENRGKSDNVPSKEVVRKMKSF
WQKLLNAGLISQRKFDNLTKAERGGLTEDDKAGFIKRQLV
ETRQITKHVANILDSRFNTEKDEEDNTIRNVKIITLKSNL
VSQFRKDFGLYKVREINDYHHAHDAYLNAVVGTALLKKYP
QLEPEFVYGDYRKNNAREENKATAKKHFYSNIMNFFASEV
KIADETGEIVWDKEKDIATVRKVLSYHQVNIVKKVEVQKG
GFSKETILPKGNSNKLIPRKNNWDPKKYGGFDSPTVAYSV
LVTYDIEKGKKKKLKTVKELVGITIMERSAFEKNPIAYLE
KKGYQNPQEDVLIKLPKYSLFELENGRRRMLASAKELQKG
NQMVLPAHLVTLLYHAKRIDKSNNSESLEYVEEHRNEFDE
LLDYIIDFSEKYILADKNLEKIKKLYEQNNEADIKELAKS
FINLLTFTAMGAPAAFKFFGETIDRKRYTSIKELLNATLI
HQSITGLYETRIDLGKLGED

[0031] By way of example, additionally now provided is a highly advantageous ancestral variant of SpyCas9, designated by the inventors the Last Streptococci Common Ancestor (LSCA); see FIG. 1, node 91 of FIG. 9 and SEQ ID NO: 3. This AnCas illustrates an AnCas deemed a common genus ancestor. It is a created common ancestor of all the starting Streptococci sequences listed in Table 1, including SpyCas9.

LSCA
SEQ ID NO: 3
MKKPYSIGLDIGTNSVGWAVITDDYKVPAKKMKVLGNTDK
QSIKKNLLGALLFDSGETAEATRLKRTARRRYTRRRNRIC
YLQEIFSEEMNKVDDSFFHRLDESFLVPEDKKYDRHPIFG
NLAEEVAYHEQYPTIYHLRKHLADSTEKADLRLVYLALAH
IIKFRGHFLIEGDLNAENTDVQKLFQQFVEVYNQTFEESH
LSEETIDVEEILTEKISKSRRLENLIKHFPNEKKNGLFGN
LIALILGLQPNFKTNFDLSEDAKLQFSKDTYEEDLENLLA
QIGDEYADLFLAAKNLYDAILLSGILTVTDNSTKAPLSAS
MIKRYEEHQKDLAQLKQFIKEHLPDKYNEIFSDKSKNGYA
GYIEGKTSQEDFYKYLKKILSKIDGAEYFLDKIDREDFLR
KQRTFDNGSIPHQIHLQELHAILRRQGEYYPFLKENQEKI
EKILTFRIPYYVGPLARGNSRFAWLTRKSDEKITPWNFDE
VVDKESSAEAFIERMTNYDTYLPNEKVLPKHSLLYETFTV
YNELTKVKYVTERGKTQFFSAEQKQEIFDHLFKKNRKVTK
KKLKDYLEKEFEEFDSVDITGVEDEFNASLGTYHDLLKIL
KDKDFLDDEENEEILEDIVLTLTLFEDREMIRKRLEKYSD
LFTKEQLKKLERRHYTGWGRLSRKLINGIRDKQSGKTILD
YLIDDGSSNRNFMQLINDDSLSFKEEIEKAQVIGETDNLH
EVVQDLAGSPAIKKGILQSLKIVDELVKVMGHNPENIVVE
MARENQTTNRGRRNSRQRLKRLEEALKNLGSNILKEHPVD
NQQLQNDRLYLYYLQNGKDMYTGEELDIDNLSQYDIDHII
PQSFIKDDSIDNRVLTSSEENRGKSDNVPSIEVVRKMKSF
WQKLLNAGLISQRKFDNLTKAERGGLTEDDKAGFIKRQLV
ETRQITKHVAQILDSRENTERDENDKRIRNVKIITLKSNL
VSQFRKDFGLYKVREINDYHHAHDAYLNAVVGTALLKKYP
KLEPEFVYGDYKKYNDRERGKATAKMFFYSNIMNFFKTEV
KLADETGEIVWDKEKDFATVRKVLSYPQVNIVKKVEVQTG
GFSKESILPKGNSDKLIPRKNNWDPKKYGGFDSPTVAYSV
LVVADVEKGKAKKLKTVKELVGITIMERSAFEKNPIAFLE
KKGYQNIQEDLIIKLPKYSLFELENGRRRLLASAKELQKG
NEMVLPAHLVTLLYHAKRIDKSNNSENLEYVEKHKNEFDE
LLDYIIDFSEKYILADKNLEKIKELYDQNDDADINELASS
FINLLTFTALGAPAAFKFFGETIDRKRYTSTKEVLNATLI
HQSITGLYETRIDLSKLGED

[0032] Also now provided are ancestral variants of SpyCas9, designated by the inventors the Last Pyogenic Common Ancestor (LPCA) and the Last Pyogenic-Dysgalactic Common Ancestor (LPDCA) evolutionary traceable to more than one Streptococci species including Streptococcus pyogenes; see nodes 92 and 95 in FIG. 9 respectively and SEQ ID Nos: 4 and 5.

LPCA
SEQ ID NO: 4
MKKPYSIGLDIGTNSVGWAVITDDYKVPAKKMKVLGNTDR
QSIKKNLIGALLFDSGETAEATRLKRTARRRYTRRKNRIC
YLQEIFSEEMAKVDDSFFHRLEESFLVPEDKKYDRHPIFG
NLADEVAYHENYPTIYHLRKKLADSTEKADLRLIYLALAH
IIKFRGHFLIEGDLNAENTDVQKLFHQLVDTYNQLFEEDQ
LDTETIDAKAILTAKISKSRRLENLISQIPGQKKNGLFGN
LIALSLGLTPNFKSNFDLSEDAKLQLSKDTYEEDLDNLLA
QIGDQYADLFLAAKNLSDAILLSDILTVNDESTKAPLSAS
MIKRYEEHQQDLALLKQLVKEQLPEKYKEIFSDKSKNGYA
GYIDGKTSQEEFYKYIKPILSKLDGAEEFLAKIDREDFLR
KQRTFDNGSIPHQIHLEELHAILRRQEEYYPFLKDNQEKI
EKILTFRIPYYVGPLARGNSRFAWLTRKSDEAITPWNFEE
VVDKEASAQAFIERMTNFDTYLPNEKVLPKHSLLYETFTV
YNELTKVKYVTEGMTKPFLSAEQKQAIVDLLFKKNRKVTV
KQLKEDYFKKIECFDSVDITGVEDRFNASLGTYHDLLKII
KDKDFLDNEENEDILEDIVLTLTLFEDREMIEKRLAKYAD
LFDKKVLKKLKRRHYTGWGRLSRKLINGIRDKQSGKTILD
FLKADGFANRNFMQLINDDSLSFKEEIEKAQVIGQTDSLH
EVVADLAGSPAIKKGILQTIKIVDELVKVMGHNPENIVIE
MARENQTTAQGIKNSRQRMKRLEEVLKKLGSNILKEHPVD
NTQLQNDRLYLYYLQNGKDMYTGQELDIDNLSQYDIDHII
PQSFIKDDSIDNKVLTSSEENRGKSDNVPSIEVVRKMKSY
WQKLLNAGLISQRKFDNLTKAERGGLTESDKAGFIKRQLV
ETRQITKHVAQILDSRENTERDENDKPIRNVKIITLKSKL
VSDFRKDFGLYKVREINDYHHAHDAYLNAVVGTALLKKYP
KLEPEFVYGDYKKYDDKERGKATAKMFFYSNIMNFFKTEV
KLANETGEIVWDKEKDFATVRKVLSYPQVNIVKKTEVQTG
GFSKESILPKGNSDKLIPRKNNWDPKKYGGFDSPTVAYSV
LVVAKVEKGKAKKLKTVKELVGITIMERSAFEKNPIAFLE
AKGYQDIQEDLIIKLPKYSLFELENGRRRLLASAKELQKG
NEMVLPAHLVTFLYHASRIDKSTSSENLEYVEQHKHEFDE
ILDYIIDFSERYILADKNLEKIKSLYNQNDDSDINELASS
FINLFTFTALGAPAAFKFFDATIDRKRYTSTKEVLNATLI
HQSITGLYETRIDLSQLGGD
LPDCA
SEQ ID NO: 5
MDKKYSIGLDIGTNSVGWAVITDDYKVPSKKFKVLGNTDR
HSIKKNLIGALLFDSGETAEATRLKRTARRRYTRRKNRIC
YLQEIFSNEMAKVDDSFFHRLEESFLVEEDKKHERHPIFG
NIVDEVAYHEKYPTIYHLRKKLADSTDKADLRLIYLALAH
MIKFRGHFLIEGDLNPDNSDVDKLFIQLVQTYNQLFEENP
INASGVDAKAILSARLSKSRRLENLIAQLPGEKKNGLFGN
LIALSLGLTPNFKSNFDLAEDAKLQLSKDTYDDDLDNLLA
QIGDQYADLFLAAKNLSDAILLSDILRVNSEITKAPLSAS
MIKRYDEHHQDLTLLKALVRQQLPEKYKEIFFDQSKNGYA
GYIDGGASQEEFYKFIKPILEKMDGTEELLAKLNREDLLR
KQRTFDNGSIPHQIHLGELHAILRRQEDFYPFLKDNREKI
EKILTFRIPYYVGPLARGNSRFAWMTRKSEETITPWNFEE
VVDKGASAQSFIERMTNFDKNLPNEKVLPKHSLLYEYFTV
YNELTKVKYVTEGMRKPFLSGEQKKAIVDLLFKTNRKVTV
KQLKEDYFKKIECFDSVEISGVEDRFNASLGTYHDLLKII
KDKDFLDNEENEDILEDIVLTLTLFEDREMIEERLKTYAH
LFDDKVMKQLKRRHYTGWGRLSRKLINGIRDKQSGKTILD
FLKSDGFANRNFMQLIHDDSLTFKEEIQKAQVSGQGDSLH
EQIANLAGSPAIKKGILQTVKVVDELVKVMGHKPENIVIE
MARENQTTQKGQKNSRERMKRIEEGIKELGSQILKEHPVE
NTQLQNEKLYLYYLONGRDMYVDQELDINRLSDYDVDHIV
PQSFIKDDSIDNKVLTRSDKNRGKSDNVPSEEVVKKMKNY
WRQLLNAKLITQRKFDNLTKAERGGLSELDKAGFIKRQLV
ETRQITKHVAQILDSRMNTKYDENDKLIREVKVITLKSKL
VSDFRKDFQFYKVREINNYHHAHDAYLNAVVGTALIKKYP
KLESEFVYGDYKVYDEQEIGKATAKRFFYSNIMNFFKTEI
TLANETGEIVWDKGRDFATVRKVLSMPQVNIVKKTEVQTG
GFSKESILPKRNSDKLIARKKDWDPKKYGGFDSPTVAYSV
LVVAKVEKGKAKKLKSVKELVGITIMERSSFEKNPIDFLE
AKGYKDVQKDLIIKLPKYSLFELENGRRRMLASAGELQKG
NEMVLPAKLVTFLYHASHIEKSKSPENNAYVEQHKHDLDE
ILEYISEFSKRYILADKNLSKVKSLFNKHEDSSISELASS
IINLFTLTSLGAPAAFKFLDTTIDRKRYTSTKEVLDATLI
HQSITGLYETRIDLSQLGGD

[0033] All of LFCA Cas, LBCA Cas and LSCA Cas have been shown to exhibit a higher nick rate and lower endonuclease (double stranded cleavage) rate than SpyCas9 under conditions suitable for SpyCas9 dsDNA cleavage. The ratio of these activities has been found to be a function of ancestral age with LFCA Cas having the highest ratio observed to date.

[0034] All of LFCA Cas, LBCA Cas and LSCA Cas also exemplify the utility of the ancestral reconstruction strategy of the invention to attain Cas9 variants with relaxation of the PAM requirement as noted above. Such AnCas nucleases may thus be deemed PAMless.

[0035] All of LFCA Cas, LBCA Cas and LSCA Cas have additionally been shown to be capable of cleaving single-stranded DNA as shown by studies reported herein. LFCA and LBCA Cas have also been shown to be capable of cleaving single-stranded RNA as shown by studies reported herein.

[0036] Finally, all of LFCA Cas, LBCA Cas and LSCA Cas have additionally been shown to trigger only weak responses to anti-Cas9 antibodies, as shown by studies reported herein. This feature may be of particular interest for in vivo applications.

[0037] The invention is described further below with reference to the following figures, and in the appended claims.

### BRIEF DESCRIPTION OF THE FIGURES

[0038] FIG. 1 illustrates ancestral Cas9 reconstruction and characterization. Shown is a phylogenetic tree of Cas9 enzymes from the Clostridia and Bacilli classes of the phylum Firmicutes, plus Cas9 enzymes from some Actinobacteria. The evolutionary route from Last Firmicute Common Ancestor (LFCA; SEQ ID NO 1) following the ancestors of Bacilli (LBCA; SEQ ID NO 2), Streptococci (LSCA; SEQ ID NO 3) and several streptococcus species ancestors to modern S. pyogenes (LPCA; SEQ ID NO 4 and LPCDA; SEQ ID NO 5) is indicated by the white dashed arrow. The sequence relationships are also presented in the simplified cladogram of FIG. 9.

[0039] FIGS. 2a-c illustrate testing of AnCas endonuclease activity as exemplified by testing of LFCA. FIG. 2a shows a DNA library containing 7 random nucleotides right after a target DNA; these 7 N represent all possible PAM sequences. FIG. 2b shows Cas9 activity assay comparing LFCA with SpyCas9. LFCA Cas cuts the PCR target amplified from the DNA library, producing two fragments with the expected sizes. FIG. 2c shows Cas9 activity assay using the S. pyogenes PAM sequence. LFCA is able to recognize the NGG PAM sequence as SpyCas9 does.

[0040] FIGS. 3a-d illustrate demonstrating nicking and endonuclease activity of LFCA. FIG. 3a shows a DNA plasmid containing a TGG PAM sequence after the DNA target. Cas9 can cut one or both strands of the DNA. FIG. 3b shows a 1% agarose gel of the DNA plasmid after 1 hour contact with 30 nM Cas9 resulting in endonuclease activity. LFCA under the same conditions shows nicking activity after 10 minutes of incubation and double strand cleavage after 1 hour. In contrast, SpyCas9 exhibits mostly double strand cutting activity. FIG. 3c shows total cleavage expressed in % (nicking and endonuclease activity) from both LFCA and SpyCas9 as a function of time. FIG. 3d shows cleavage expressed in % with a distinction made between nicking and endonuclease activity. LFCA cuts one strand of DNA and, after 1 hour of incubation, starts to cleave the other strand. SpyCas9 has mostly endonuclease activity (i.e., cuts both strands).

[0041] FIGS. 4a-b illustrate PAM determination for LFCA. FIG. 4a shows the PAM wheel from LFCA PAM assessment with provision of 3 nucleotide PAMs. LFCA does not show specificity of recognition for any particular PAM with 3 nucleotides. Similar results were obtained with 7 nucleotide PAMs. FIG. 4b shows in vitro cleavage assay results of plasmid DNA with different PAM sequences comparing both LFCA and SpyCas9. LFCA (10 nM) nicked all the plasmids with different PAMs within only 10 minutes of reaction. In contrast, SpyCas9 cut almost 100% of the plasmid containing its canonical PAM sequence, TGG, and showed low or no activity with other PAM sequences.

[0042] FIGS. 5a-d show thermal and pH stability testing of LFCA. FIG. 5a shows total Cas enzyme activity assay using plasmid DNA with a TGG PAM for 1 hour with 30 nM of Cas enzyme at pH 7.9 and different temperatures ranging from 4° C. to 60° C. LFCA shows higher activity than SpyCas9 at 4° C. and from 53-60° C. FIG. 5b shows nicking and endonuclease activity of both Cas enzymes at different temperatures. FIG. 5c shows total Cas enzyme activity assay using plasmid DNA with a TGG PAM for 1 hour and with 30 nM of Cas enzyme at 37° C. and different pH ranging from 4 to 9.5. LFCA showed higher activity at acidic pH (4-5.5) in comparison with SpyCas9. FIG. 5d shows nicking and endonuclease activity of both Cas enzymes at different pH.

[0043] FIGS. 6a-f illustrate a comparison of LFCA and SpyCas9 genome-editing in HEK293T cells. FIG. 6a shows humanized LFCA and SpyCas9 coding sequences cloned in expression plasmid pCDNA 3.1 for transfection with gRNA into HEK293T cells for targeting the AAVS1 locus. FIG. 6b shows an immunofluorescent image from cells transformed with either Cas enzyme. Cells expressing the hCas coding sequence are stained in orange, the nucleus is stained with DAPI. FIG. 6c shows results of a T7 assay for Cas enzyme activity. PCR products from cells transformed with gRNA and hCas coding sequence were incubated with T7E1 to measure indel formation. FIG. 6d shows hCas9, gRNA and donor DNA carrying eGFP gene transfected into HEK293T cells for knock-in of eGFP into the AAVS1 locus. FIG. 6e shows confocal microscopy images of cells expressing eGFP. FIG. 6f shows relative fluorescent measured in the images from cells expressing eGFP after hCas enzyme transfection.

[0044] FIG. 7 illustrates a comparison of LFCA and SpyCas9 knock-in in HEK293T cells targeting a TTC PAM. Also shown is an electrophoresis gel with the extracted gDNA from the cells and amplified locus. The bands with the expected size in all the samples are seen on the gel apart from the TTC PAM targeted with Spy Cas9.

[0045] FIG. 8 shows agarose gel test results illustrating the ability of LFCA to use a sgRNA in which the targeting sequence is linked to a tracRNA component corresponding to the Cas9 tracrRNA component of one of a wide variety of existing bacterial species having a Cas9 ortholog.

[0046] FIG. 9 provides a cladogram constructed using the sequences listed in Table 1. Each node represents an ancestral state with a sequence shown in the sequence listing.

[0047] FIGS. 10a-c show nicking and endonuclease Cas9 activity of LFCA, LBCA and LSCA in comparison to SpyCas9. FIG. 10a shows total cleavage (both nicking and endonuclease activity) for LFCA, LBCA, LSCA and SpyCas9. All the Cas9 enzymes reached total cleavage within around 10 minutes of incubation. FIG. 10b shows plasmid linearization rate of LFCA, LBCA, LSCA and SpyCas9. FIG. 10c shows nick rate of LFCA, LBCA, LSCA and SpyCas9.

[0048] FIG. 11 shows the percentage of DNA template with a double stranded break (DSB), i.e., percentage of linearized template after 30 minutes of incubation with the respective Cas nuclease and percentage of nicked DNA template after 30 minutes of incubation with the respective Cas nuclease. LFCA, LBCA, and LSCA produce a lower amount of linearized DNA template (i.e., lower percentage of DSB) than SpyCas9 but produce higher amounts of nicked template than SpyCas9.

[0049] FIG. 12 shows an alternative means of illustrating the differences in the cleavage (endonuclease and nickase) activity of ancestral Cas enzymes in comparison to SpyCas9. The linearization and nick rate are shown plotted against AnCas age for all of LFCA, LBCA and LSCA compared to SpyCas9. The higher nick rate of the SpyCas9 in absolute terms result of the fitting assuming an equal initial point for all the enzymes, which is true for t=0 minute but not for t>0 minute, because higher nickase activity measured by nicked cleavage results in a lower rate. As such, a negative value for the nick rate is shown. This is a conversion of the percentage of cleaved (nicked or linearized) plasmid template as shown in FIG. 11 into time units which provides a negative lambda parameter of the exponential decay shown in FIG. 10. LBCA and LSCA have a higher linearization rate than LFCA, but still lower than SpyCas9 and hence the trend is for linearization rate to decrease with ancestral age. In contrast, the nick rate increases with ancestral age.

[0050] FIGS. 13a-b illustrate PAM determination for LBCA and LSCA. FIG. 13a shows a PAM wheel from LBCA and LSCA PAM sequencing. LBCA and LSCA do not show specificity of recognition for any 3 nucleotide PAM. Similar results were obtained using 7 nucleotides. FIG. 13b shows results of an in vitro cleavage assay of plasmid DNA with different PAM sequences comparing LFCA, LBCA, LSCA and SpyCas9. LBCA (10 nM) nicked all the plasmids with different PAM within 10 minutes of reaction. LSCA showed similar preference but has higher linearization rate cleavage.

[0051] FIG. 14 shows results of testing the same ancestral Cas9 enzymes for endonuclease activity on single-stranded DNA. It is shown that the three ancestral enzymes cleave single-stranded DNA with or without gRNA. As expected, SpyCas9 was unable to cleave the same single stranded DNA.

[0052] FIGS. 15A-E show the activity of AnCas endonucleases on a supercoiled DNA substrate. FIG. 15A shows in vitro cleavage assay for SpCas9 and all AnCas on a 4007-bp substrate at different reaction times showing nicked and linear fractions. FIG. 15B shows the quantification of total cleavage at different reaction times and exponential fits (lines). FIG. 15C shows the quantification of nicked fraction for all AnCas and SpCas9 at different times. FIG. 15D shows the quantification of DSB cleavage. Single-exponential fits were used to obtain k_{cleave} and maximum fraction cleaved (amplitude). FIG. 15E shows the DSB fraction (left axis) and nicked fraction (right axis) plotted against evolutionary time.

[0053] FIGS. 16A-C show PAM determination of AnCas. FIG. 16A shows the PAM wheels (Krona plots) for all five AnCas and SpCas9, used as control. FIG. 16B shows the percentage of reads containing an NGG PAM sequence 3-4 bp downstream the cleavage position plotted against evolutionary time. FIG. 16C shows in vitro cleavage assay (DSB and nicked products) using a variety of PAM sequences represented by TNN and CCC as control. Incubation time was 10 minutes.

[0054] FIGS. 17A-G show sgRNA test and nuclease activity of AnCas on single-stranded substrates. FIG. 17A shows in vitro cleavage assay on a supercoiled DNA substrate of AnCas and SpCas9 using sgRNAs from different species. LFCA [FCA], LBCA [BCA] and SpCas9 are shown. FIG. 17B shows the quantification of in vitro cleavage for all AnCas and SpCas9 using the different sgRNAs. FIG. 17C shows in vitro cleavage assay on an 85-nt ssDNA fragment at different incubation times for LFCA [FCA], LBCA [BCA] and SpCas9. FIG. 17D shows in vitro cleavage assay on a 60-nt ssRNA at different incubation times for LFCA [FCA], LBCA [BCA] and SpCas9. FIG. 17E shows the quantification of fraction cleavage of ssDNA at different times and exponential fits for determination of kinetics parameters. In both FIG. 17C and FIG. 17D, the control lane is the same for the three proteins. FIG. 17F shows the quantification of fraction cleavage of ssRNA at different times and exponential fits for determination of kinetics parameters. All kinetics parameters are summarized in Table 2. FIG. 17G shows the results from an ELISA test of Anti-Cas9 rabbit antibody against SpCas9, LFCA [FCA], LBCA [BCA] and BSA, used as control.

[0055] FIG. 18 shows in vitro site-specific editing measure in HEK293T cells by NGS targeted sequencing using Illumina technology, in 3 independent targets.

[0056] FIGS. 19A-D show the activity of LFCA [FCA] H838A endonucleases on a supercoiled DNA substrate. FIG. 19A shows in vitro cleavage assay for LFCA [FCA] H838A on a 4007-bp substrate at different reaction times showing nicked and linear fractions. FIG. 19B shows the quantification of total cleavage fraction at different reaction times and exponential fits (lines). FIG. 19C shows the quantification of fraction nicked at different times. FIG. 19D shows the quantification of DSB cleavage. Single-exponential fits were used to obtain k_{cleave} and maximum fraction cleaved (amplitude).

[0057] FIG. 20 shows the posterior probability distribution for each inferred residue of all ancestral AnCas endonucleases. The residue with the highest posterior probability is assigned at each position. In all cases, posterior probability average is close to 1 except for LFCA [FCA] which shows an average value of 0.74.

[0058] FIGS. 21A-B show the activity of AnCas endonucleases at different temperature and pH values. FIG. 21A shows the quantification of total cleavage at different temperatures in the range 5-60° C. FIG. 21B shows the quantification of total cleavage at different pH in the range 4-9.5.

[0059] FIG. 22 shows PAM wheels (Krona plots) for all five AnCas and SpCas9 including 7-nucleotides PAM analysis. A preference for NGG PAM is observed except for LFCA [FCA].

[0060] FIG. 23 shows traffic light reporter cleavage assay. The relative NHEJ frequency is estimated by the number of RFP-positive cells and is normalized to SpCas9.

[0061] FIG. 24 shows a comparative assessment of PAM preferences for two AnCas [LFCA and LBCA] versus the wild-type Streptococcus pyogenes Cas9 [SpCas9], the so-called “ancestral Cas9 protein” of WO 2021/084533 A1 (SEQ ID NO: 268 of WO′533) [Anc. Cas], and the so-called “near-PAMless Cas9 proteins SpG and SpRY” of Walton et al. (2020. Science. 368(6488):290-296) [SpRY and SpG, respectively]. PAM preference for each of these nucleases is indicated, with N=any nucleotide and R=A or G.

### DETAILED DESCRIPTION

[0062] The starting sequence population for obtaining a functional ancestral Cas variant by the strategy now taught may preferably be, as exemplified, a population of Cas9 sequences from bacterial species in existence, whereby a phylogenetic tree can be constructed based on sequence alignment information. Computer-implemented methods for constructing such trees are well known in the field involving sequence alignment and recognition of conserved regions. However, as noted above, it is not excluded that the phylogenetic tree may be constructed of sequences of another class II Cas enzyme type.

[0063] Preferably, the starting sequences will span more than one genus. For example, as illustrated in the Example section, in seeking an advantageous ancestral Cas9 variant, a plurality of Cas9 sequences may be selected from two or more of Streptococcus, Enterococcus, Listeria, Clostridium, Pelagirhabdus, Halolactibacillus, Floricoccus, Vagococcus, Urinacoccus, Vagococcus, Dorea, Ruminococcus, Lachnospira, Anaerostipes, Oisenella and Bifidobacterium. More than one species sequence may be chosen from each selected genus, e.g., 2, 3, 4 or more, e.g., up to 25 or more, e.g., 28, sequences from Streptococcus species. As noted above, LSCA is a common ancestor evolutionary traceable to all 28 Streptococci species listed in Table 1 including Streptococcus pyogenes, as shown by FIG. 1.

[0064] More preferably, the starting population of sequences will span more than one class of a phylum of interest. Thus, as indicated above, in seeking an advantageous ancestral Cas9 variant, it has been found useful to combine in the starting population Cas9 sequences derived from both Bacilli and Clostridia classes of bacteria. For example, the starting population of sequences may desirably comprise at least multiple sequences derived from different species of Streptococcus, multiple sequences derived from different species of Enterococcus, multiple sequences derived from different species of Listeria and multiple sequences derived from species of Clostridium. The diversity of the starting population may be further expanded to cross phyla as illustrated by inclusion of some Actinobacteria sequences in the starting population of Cas9 sequences employed in the Example section. Desirably, the starting population of Cas sequences may span a plurality of sub-types.

[0065] Starting from a compiled phylogenetic tree from known Cas sequences, evolutionary routes to predicted ancestral forms may be compiled, which may equate with many millions of years predating today. A selected ancestral variant sequence obtained in accordance with the invention may equate with an evolutionary period of at least 500 million years from the present, for example at least 700-800 million years, or even 1000 million years or more. As noted above, the evolutionary period may equate with as long as 2-3 Bys, e.g., about 2.2 to 2.4 Bys.

[0066] As shown by FIG. 1, LFCA Cas is such a reconstructed ancestor of Cas enzymes derived from evolutionary route analysis off a phylogenetic tree of Cas9 sequences derived from a population of existing bacterial species spanning Clostridia and Bacilli (both bacterial genera of the Firmicutes phylum) and supplemented with some Actinobacteria. It can be thought of as an ancestor of an earlier ancestral member of an evolutionary route to existing Cas9 enzymes of Bacilli origin (the reconstructed class ancestor designated LBCA Cas, with SEQ ID NO: 2) and an ancestor to a reconstructed ancestor of a broad variety of Cas enzymes of more specifically Streptococcus origin (the reconstructed genus ancestor LSCA Cas, with SEQ ID NO: 3). LSCA is in turn an ancestor to a reconstructed ancestor of a smaller selection (8 out of 28) of Cas enzymes of Streptococcus origin (the reconstructed ancestor designated LPCA Cas, with SEQ ID NO: 4) and LPCA is in turn an ancestor of Streptococcus pyogenes and Streptococcus dysgalactiae sequences (the reconstructed ancestor LPDCA Cas, with SEQ ID NO: 5).

[0067] As used herein and in the accompanying Figures, the terms “Bys”, “Bya” and “Gya” are used interchangeably to refer to billions of years.

[0068] As noted above, LFCA Cas is represented by node 63 of the illustrated evolutionary route and has the amino acid sequence shown in SEQ ID NO: 1. It shows high production level as well as high efficiency targeting and editing of DNA both in vitro and in human cells.

[0069] Thus, now provided as an aspect of the invention is a Cas nuclease comprising or consisting of the LFCA Cas having the amino acid sequence of SEQ ID NO: 1, representing a preferred example of a functional ancestral Cas obtained by adoption of the strategy taught herein for identification of such novel Cas enzymes. The LFCA Cas is deemed evolutionarily related to SpyCas9 but with a number of advantageous differences which render it an especially preferred AnCas nuclease.

[0070] By way of interesting properties of LFCA Cas, it is now reported that:
[0071] (i) LFCA Cas is not known in nature and has only 54% of sequence identity with SpyCas9. Nevertheless, it can employ a sgRNA with the 3′ end of a SpyCas sgRNA for guide RNA/Cas protein interaction as shown in the Example section;
[0072] (ii) in contrast to SpyCas9, it exhibits time-separable nicking activity followed by endonuclease activity on double-stranded plasmid DNA providing a SpyCas9 PAM sequence and under conditions for endonuclease cleavage of the same plasmid by SpyCas9;
[0073] (iii) it exhibits broad PAM specificity; as shown by the PAM wheel of FIG. 4a, LFCA Cas did not show specificity of PAM recognition. The cleavage data of FIG. 4b show that it nicked plasmid DNA regardless of 3 nucleotide sequence provided as a proposed PAM sequence within 10 minutes at 10 nM. In contrast, SpyCas9 under the same conditions cut almost 100% of the plasmid containing its canonical PAM sequence, TGG, and showed low or no activity with other PAM sequences. Similar results were obtained using 7 nucleotide variant sequences for PAM provision. Thus, under the conditions tested, LFCA Cas can be designated “PAMless”;
[0074] (iv) it shows high flexibility in gRNA requirement; as shown by FIG. 8, it can utilize a sgRNA with a Cas9 tracrRNA component corresponding to that of any of a plurality of existing bacterial species and spanning a wide variety including Streptococcus thermophilus, Enterococcus faceium, Clostridium perfringens and Finegoldia magna, as well as Streptococcus pyogenes;
[0075] (v) LFCA Cas showed higher cleavage activity then SpyCas9 at low temperatures (from 4 to 20° C.) and at pH 7.9, which was observed as nicking activity;
[0076] (vi) at higher temperatures (from 53 to 60° C.), it exhibited higher thermal stability than SpyCas9 with both nickase and endonuclease activity being observed;
[0077] (vii) in pH stability tests at different pHs at 37° C., LFCA Cas maintained higher activity in acidic conditions than Spy Cas9. At alkaline pH, the activity of LFCA Cas remained the same, where SpyCas9 exhibited its optimal performance;
[0078] (viii) LFCA Cas shows cleavage activity for a single-stranded DNA substrate as shown in FIG. 13. As is well known, this is not an activity of SpyCas9 under normal usage conditions in the gene modification field.

[0079] In human cells (exemplified herein with HEK293T cells), LFCA Cas has been shown to be capable of driving indel formation at a targeted locus (exemplified herein with the AAVS1 locus) when expressed in such cells with a suitable gRNA. Furthermore, ability to drive knock-in genetic modification at the same locus has been confirmed as shown in FIGS. 6 and 7.

[0080] Also provided as an aspect of the invention are Cas nucleases comprising or consisting of the LBCA Cas, LSCA Cas, LPCA Cas and LPCDA Cas having the amino acid sequence of SEQ ID NO: 2, 3, 4 and 5, respectively. Each of LBCA Cas, LSCA Cas, LPCA Cas and LPCDA Cas share interesting properties with LFCA Cas, which differentiate them as Cas enzymes from known Cas9 enzymes. Of particular interest, for example, is the higher percentage of nicked plasmid template produced compared to SpyCas as demonstrated additionally for LBCA Cas and LSCA Cas in the Example section (equating with a higher nick rate to plasmid linearization rate compared to SpyCas as demonstrated by exemplification below). As noted above, the percentage of nicked plasmid template (and/or nick rate) has interestingly been found to be increased in this group of enzymes with ancestral age, this feature being most pronounced in LFCA Cas. In contrast, the rate of linearization and/or percentage of double stranded breaks was found to decrease with ancestral age.

[0081] Thus, the present invention relates to a Cas nuclease comprising or consisting of:
[0082] (i) the Cas nuclease designated as LFCA Cas and having the amino acid sequence set forth in SEQ ID NO: 1;
[0083] (ii) the Cas nuclease designated as LBCA Cas and having the amino acid sequence set forth in SEQ ID NO: 2;
[0084] (iii) the Cas nuclease designated as LSCA Cas and having the amino acid sequence set forth in SEQ ID NO: 3;
[0085] (iv) the Cas nuclease designated as LPCA Cas and having the amino acid sequence set forth in SEQ ID NO: 4;
[0086] (v) the Cas nuclease designated as LPDCA Cas and having the amino acid sequence set forth in SEQ ID NO: 5; or
   a variant of such a Cas nuclease which retains one or more of the following distinguishing characteristics compared to SpyCas9:
[0087] (a) a higher percentage of nicked DNA plasmid template and/or a lower percentage of linearized DNA plasmid template under conditions whereby SpyCas9 results in substantially exclusively linearized DNA plasmid template;
[0088] (b) a higher nick rate and lower linearization rate on a DNA plasmid target under conditions whereby SpyCas9 results in substantially exclusively linearization or almost exclusively linearization (preferably, in a ratio of linearized DNA plasmid target to nicked DNA plasmid template of at least about 4:1) while the variant provides observable nicked target;
[0089] (c) a relaxed PAM requirement comparable to any of LFCA Cas, LBCA Cas and/or LSCA Cas;
[0090] (d) an ability to cleave single-stranded DNA;
[0091] (e) an ability to use a sgRNA in which the targeting sequence is linked to a tracrRNA component, wherein said tracrRNA component is selectable from the tracrRNA components of Cas9 gRNAs employed by a plurality of existing bacterial species.

[0092] As used herein, the term “variant” refers to a Cas nuclease having at least one amino acid mutation (e.g., addition, substitution or deletion) compared to the sequence of any one of SEQ ID NO: 1, SEQ ID NO: 2, SEQ ID NO: 3, SEQ ID NO: 4, and SEQ ID NO: 5, respectively. Typically, a Cas nuclease variant shares at least 60% of sequence identity, preferably at least 65%, 70%, 75%, 80%, 85%, 90%, 95%, 96%, 97%, 98%, 99% or more of sequence identity with the amino acid sequence of SEQ ID NO: 1, SEQ ID NO: 2, SEQ ID NO: 3, SEQ ID NO: 4, or SEQ ID NO: 5. It is to be understood that the amino acid sequence of a Cas variant is not 100% identical to any one of SEQ ID NO: 1, SEQ ID NO: 2, SEQ ID NO: 3, SEQ ID NO: 4, or SEQ ID NO: 5.

[0093] In some embodiments, the amino acid sequence of the Cas nuclease variant share at least 60%, 65%, 70%, 75%, 80%, 85%, 90%, 95% or more of sequence identity with the amino acid sequence of SEQ ID NO: 1.

[0094] In some embodiments, the amino acid sequence of the Cas nuclease variant share at least 75%, 80%, 85%, 90%, 95% or more of sequence identity with the amino acid sequence of SEQ ID NO: 2.

[0095] In some embodiments, the amino acid sequence of the Cas nuclease variant share at least 80%, 85%, 90%, 95% or more of sequence identity with the amino acid sequence of SEQ ID NO: 3.

[0096] In some embodiments, the amino acid sequence of the Cas nuclease variant share at least 85%, 90%, 95% or more of sequence identity with the amino acid sequence of SEQ ID NO: 4.

[0097] In some embodiments, the amino acid sequence of the Cas nuclease variant share at least 95%, 96%, 97%, 98%, 99% or more of sequence identity with the amino acid sequence of SEQ ID NO: 5.

[0098] In some embodiments, the Cas nuclease according to the invention has one or more amino acid changes by way of substitution or deletion, e.g., one or more conservative substitutions, whereby endonuclease and/or nickase activity is retained with the relaxed PAM specificity of LFCA Cas, LBCA Cas and/or LSCA Cas. In some embodiments, the Cas nuclease according to the invention has nickase activity. In some embodiments, the Cas nuclease according to the invention has relaxed PAM requirement. In some embodiments, the Cas nuclease according to the invention has no PAM requirement, i.e., the Cas nuclease is PAMless.

[0099] In a preferred embodiment, the Cas nuclease of the invention is LFCA with SEQ ID NO: 1 or a variant thereof, or is LBCA with SEQ ID NO: 2 or a variant thereof.

[0100] By way of example, LBCA Cas, LSCA Cas, LPCA Cas and LPCDA Cas have the following additional properties of interest:
[0101] (a) LBCA Cas is not known in nature and only has 70% identity to SpyCas9. LSCA Cas is not known in nature and only has 75% identity to SpyCas9. LPCA Cas is not known in nature and has 83.5% identity to SpyCas9. LPDCA Cas is not known in nature and has 97.5% identity to SpyCas9. Nevertheless, they can employ a sgRNA with the 3′ end of a SpyCas sgRNA for guide RNA/Cas protein interaction as shown in the Example section.
[0102] (b) In contrast to SpyCas9, as noted above, both of LBCA Cas and LSCA Cas have been found to share with LFCA Cas a relaxed PAM requirement (FIGS. 13a, 13b, and 24) and its ability to cleave single-stranded DNA (FIG. 14).

[0103] It will be recognized, however, that the novel AnCas enzymes exemplified herein are merely illustrative of the utility of the novel ancestral sequence reconstruction approach of the invention for attaining beneficial such enzymes for nucleic acid modification. It will be appreciated that the teaching herein opens up the attainment of other Cas9 variant enzymes, including variants of the exemplified AnCas enzymes, which share one or more of the same novel characteristics compared with SpyCas9, e.g.,
[0104] (a) a higher percentage of nicked DNA plasmid template and/or lower percentage of linearized DNA plasmid template (i.e., percentage of double stranded breaks) under conditions whereby SpyCas9 results in substantially exclusively linearized DNA plasmid template and/or
[0105] (b) a higher nick rate and lower linearization rate on a DNA plasmid target under conditions whereby SpyCas9 results in substantially exclusively linearization or almost exclusively linearization (as may equate with a ratio of linearized DNA plasmid target to nicked DNA plasmid template of at least about 4:1) while the variant provides observable nicked target and/or
[0106] (c) a relaxed PAM requirement comparable to any of LFCA Cas, LBCA Cas and LSCA Cas and/or
[0107] (d) an ability to cleave single-stranded DNA and/or single-stranded RNA, and/or
[0108] (e) an ability to use a sgRNA in which the targeting sequence is linked to a tracrRNA component, wherein said tracrRNA component is selectable from the tracrRNA components of Cas9 gRNAs employed by a plurality of existing bacterial species, e.g., including all of Streptococcus pyogenes, Streptococcus thermophilus, Enterococcus faceium, Clostridium perfringens and Finegoldia magna.

[0109] In particular, an aspect of the invention also provided herein are functional equivalents of the preferred ancestral Cas nucleases, which functional equivalents are represented by a node on the evolutionary route of FIG. 9. The amino acid sequences of these functional equivalents of Cas nucleases are given in the accompanying sequence listing, in SEQ ID NOs: 10 to 236.

[0110] the invention also extends to a method for obtaining an ancestral Cas nuclease, where the selected ancestral enzyme is evolutionarily traceable to existing Cas9 enzymes, preferably for example, evolutionary traceable to SpyCas9, and has one or more of characteristics (a) to (e) as noted above:
[0111] (a) a higher percentage of nicked DNA plasmid template and/or a lower percentage of linearized DNA plasmid template under conditions whereby SpyCas9 results in substantially exclusively linearized DNA plasmid template;
[0112] (b) a higher nick rate and lower linearization rate on a DNA plasmid target under conditions whereby SpyCas9 results in substantially exclusively linearization or almost exclusively linearization (preferably, in a ratio of linearized DNA plasmid target to nicked DNA plasmid template of at least about 4:1) while the variant provides observable nicked target;
[0113] (c) a relaxed PAM requirement comparable to any of LFCA Cas, LBCA Cas and/or LSCA Cas;
[0114] (d) an ability to cleave single-stranded DNA;
[0115] (e) an ability to use a sgRNA in which the targeting sequence is linked to a tracrRNA component, wherein said tracrRNA component is selectable from the tracrRNA components of Cas9 gRNAs employed by a plurality of existing bacterial species.

[0116] Especially preferred may be selection of an AnCas with the above-noted relaxed PAM specificity, possibly in combination with one or both of characteristics (a) and (d) or one or both of characteristics (a) and (e) or possibly in combination with all of (a), (d) and (e). As noted above, the selected AnCas may, for example, provide a ratio of linearized DNA plasmid target to nicked DNA plasmid template of between at least about 2.3:1 to at least 1:4 under conditions whereby SpyCas9 results in a ratio of linearized DNA plasmid target to nicked DNA plasmid template of at least about 4:1.

[0117] Thus, a method of the invention can be applied to obtain an ancestral Cas nuclease which has one or more of the following characteristics:
[0118] a ratio of linearized DNA plasmid target to nicked DNA plasmid template of between at least about 2.3:1 to at least 1:4 under conditions whereby SpyCas9 results in a ratio of linearized DNA plasmid target to nicked DNA plasmid template of at least about 4:1;
[0119] relaxed PAM requirement comparable to any of LFCA Cas, LBCA Cas and LSCA Cas;
[0120] ability to cleave single-stranded DNA and/or single-stranded RNA; and
[0121] ability to use a sgRNA in which the targeting sequence is linked to a tracrRNA component, wherein said tracrRNA component is selectable from the tracrRNA components of Cas9 gRNAs employed by a plurality of existing bacterial species

[0122] Such a method may further comprise converting such an AnCas nuclease to a variant which is either a nickase only or a deadCas with no nuclease activity and/or provide linkage to a non-nuclease effector, e.g., in a fusion protein. Such variants which are either a nickase only or a deadCas with no nuclease activity and/or a fusion protein are also contemplated as product per se in the present invention.

[0123] In some embodiments, the Cas nuclease is a non-nuclease modified deadCas variant of a nuclease according to the invention, which has been converted to a deadCas with no nuclease activity by catalytic site mutagenesis. In some embodiments, the Cas nuclease is catalytically dead. In some embodiments, the Cas nuclease is a deadCas.

[0124] In some embodiments, the Cas nuclease or Cas nuclease variant is linked with a non-nuclease effector for genetic modification or regulation. In some embodiments, the non-nuclease effector is a fusion protein comprising the Cas nuclease or Cas nuclease variant, and said non-nuclease effector.

[0125] In some embodiments, the ancestral Cas nuclease further has one or more of the following characteristics:
[0126] ability to cleave single-stranded DNA, and/or
[0127] ability to cleave single-stranded RNA.

[0128] In one embodiment, the ancestral Cas nuclease has relaxed PAM requirement comparable to any of LFCA Cas, LBCA Cas and LSCA Cas. In one embodiment, the ancestral Cas nuclease has no PAM requirement.

[0129] In some embodiments, the ancestral Cas nuclease has one or more of the following characteristics:
[0130] ability to cleave single-stranded DNA,
[0131] ability to cleave single-stranded RNA, and/or
[0132] relaxed PAM requirement comparable to any of LFCA Cas, LBCA Cas and LSCA Cas.

[0133] In some embodiments, the ancestral Cas nuclease has one or more of the following characteristics:
[0134] ability to cleave single-stranded DNA,
[0135] ability to cleave single-stranded RNA, and/or
[0136] no PAM requirement (i.e., PAMless activity) comparable to LFCA Cas.

[0137] Also provided are variants of the exemplified AnCas nucleases noted above which retain one or more of the distinguishing characteristics (a) to (e) above compared to SpyCas9. Again, especially preferred may be retention of the relaxed PAM specificity as exhibited by, for example, LFCA Cas, possibly in conjunction with one, two or all characteristics specified in (a), (b), (d) and (e) above, e.g., production of higher amounts of nicked template and/or lower amounts of linearized template (amount of double stranded breaks) compared with SpyCas9 as noted above and/or higher ratio of nick rate to linearization rate compared with SpyCas9 as noted above and/or ability to cleave single-stranded DNA. Preferably, all these characteristics will be retained.

[0138] As indicated above, especially preferred is LFCA Cas and variants thereof which are functionally equivalent, i.e., maintain all the characteristics of LFCA Cas (i) to (viii) listed above. LFCA Cas variants which retain at least relaxed PAM specificity and/or flexible tracrRNA usage as discussed above are, however, deemed highly favourable additions to the Cas enzyme toolbox.

[0139] In accordance with convention, the terms “linear activity”, and “endonuclease activity” are used synonymously herein to refer to nuclease activity for cleaving both strands of a double stranded DNA where it is provided in the form of plasmid. The terms “linearization activity rate”, “linearization rate” and “linear activity rate” are used herein synonymously to refer to a measure of the amount of target dsDNA that has been cleaved through both strands as a function of time. As used herein, “nickase” refers to a nuclease which cleaves only one strand of a dsDNA molecule, such as a plasmid, thereby generating a nick. “Nickase activity rate” and “nick rate” are used interchangeably and refer to a measure of the amount of target dsDNA that has been cleaved through one strand as a function of time. The nickase and/or linear activity rate may be tested by a method involving
[0140] (i) incubating Cas nuclease at 30 nM with gRNA at 1:1 ratio in a cleavage buffer (e.g., 100 mM NaCl, 50 mM Tris-HCl, 10 mM MgCl₂, 100 μg BSA, pH 7.9) at 37° C. for at least 5 minutes;
[0141] (ii) adding target DNA, e.g., a plasmid;
[0142] (iii) incubating, e.g., for 30 minutes;
[0143] (iv) stopping the cleavage reaction; and
[0144] (v) visualizing the final reaction products, e.g., by running the final reaction products on an agarose gel.

[0145] Using a method similar to the method described using an incubation time of 30 minutes, the preferred Cas nucleases of the invention may produce a ratio of linearized DNA plasmid target to nicked DNA plasmid template of between at least 2.3:1 to at least 1:4 under conditions whereby SpyCas9 results in a ratio of linearized DNA plasmid target to nicked DNA plasmid template of at least 4:1. Thus as noted above after 30 minutes, AnCas enzymes obtained in accordance with the invention such as LFCA, LBCA and LSCA may nick at least 30% of the DNA template up to at least 70%, e.g., about 80%, of the DNA template whereas under the same conditions SpyCas9 nicks about 10% of the DNA template in the same amount of time as illustrated in FIG. 11.

[0146] The percentage of DNA template with double stranded breaks (DSB) (i.e., linearized template) formed by the preferred Cas nucleases of the invention may be from 10% up to about 70%. The percentage of DNA template with double stranded breaks (DSB) formed by the preferred Cas nucleases of the invention may be at most 70%, 60%, 50%, 40%, 30%, 20%, or 10%. The percentage of DNA template with double stranded breaks (DSB) formed by the preferred Cas nucleases of the invention may be from 15% up to about 65%. The percentage of double stranded breaks (DSB) formed in a DNA template by the preferred Cas nucleases of the invention may be from 19% up to about 62%.

[0147] The percentage of DNA template with double stranded breaks (DSB) formed by LFCA Cas may be about 19%. The percentage of DNA template with double stranded breaks (DSB) formed by LBCA Cas may be around 36%. The percentage of DNA template with double stranded breaks (DSB) formed by LSCA Cas may be around 62%. Conversely, under the same experimental conditions as those used to test any one of the preferred Cas nucleases of the invention, the percentage of DNA template with double stranded breaks (DSB) formed by SpyCas9 is at least 70%, 75% or 80%.

[0148] The percentage of DNA template with nicks formed (i.e., nicked template produced) by the preferred Cas nucleases of the invention may be from 20% up to about 100%. The percentage of DNA template with nicks formed by the preferred Cas nucleases of the invention may be at least 30%, 40%, 50%, 60%, 70%, 80%, or 90%. The percentage of DNA template with nicks formed by the preferred Cas nucleases of the invention may be from 20% up to about 90%. The percentage of DNA template with nicks formed by the preferred Cas nucleases of the invention may be from 35% up to about 85%.

[0149] The percentage of DNA template with nicks formed by LFCA Cas may be around 80%. The percentage of DNA template with nicks formed by LBCA Cas may be around 65%. The percentage of DNA template with nicks formed by LSCA Cas may be around 35%. Conversely, under the same experimental conditions as those used to test any one of the preferred Cas nucleases of the invention the percentage of DNA template with nicks formed by SpyCas9 is at most about 20% or 10%.

[0150] As shown in FIG. 12, the difference in cleavage activity of the preferred ancestral Cas enzymes of the invention can be illustrated by way of a linearization rate and a nick rate. Thus, it can be considered that the linearization rate of the preferred Cas nucleases of the invention may be from about 0.001 to about 0.1 m⁻¹. The nick rate of the preferred Cas nucleases of the invention may be from about −0.4 to about −0.1 m⁻¹. For example, the linearization rate and nick rate may be as shown in Table 2.

[0151] In some embodiments, the Cas nuclease variant is modified by catalytic site mutagenesis to retain just nickase activity. In some embodiments, the Cas nuclease variant is a Cas nickase. In some embodiments, the amino acid sequence of the Cas nuclease comprises one or more amino acid changes by way of substitution or deletion, e.g., one or more conservative substitutions, whereby endonuclease and/or nickase activity is retained with the relaxed PAM specificity of LFCA Cas.

[0152] From the above, it will be evident that LFCA Cas, LBCA Cas, LSCA Cas, LPCA Cas and LPCDA Cas and variants thereof as discussed above (and functional equivalents thereof, e.g., those represented by a node on the evolutionary route of FIG. 9 or others obtained in accordance with the ancestral reconstruction strategy of the invention) are seen as highly useful novel additions to the toolbox of Cas proteins, especially LFCA Cas with the highest observed nick rate. They may be used directly under conditions to promote nickase only action (although modification by catalytic site mutagenesis to retain just nickase activity as, for example, LFCA nickase, LBCA nickase and LSCA nickase, LPCA nickase and LPDCA nickase is not excluded). Any of LFCA Cas, LBCA Cas, LSCA Cas, LPCA Cas and LPCDA Cas or such variants may be linked, e.g., fused, with an effector protein for gene modification, e.g., a base editor such as a deaminase for base editing or a reverse transcriptase for prime-editing.

[0153] It will be appreciated that variants of any of LFCA Cas, LBCA Cas, LSCA Cas, LPCA and LPCDA Cas (or a corresponding nickase obtained by catalytic site mutagenesis) which have one or more amino acid changes by way of substitution or deletion, e.g., one or more conservative substitutions, may be similarly employed as a Cas9 endonuclease or Cas9 nickase provided endonuclease and/or nickase activity is retained. Of especial interest and forming part of the invention are such variants that also retain the relaxed PAM specificity as shown for LFCA Cas, LBCA Cas and/or LSCA Cas.

[0154] Variants of an AnCas nuclease obtained by the ancestral reconstruction strategy of the invention, or variants of a corresponding nickase obtained by catalytic site mutagenesis, which form part of the invention may, for example, have various degrees of sequence identity to the parent enzyme subject to retaining the desired distinguishing characteristic or characteristics. They may for example, have at least 80%, at least 90%, at least 95%, at least 96%, at least 97%, at least 98% or at least 99% sequence identity.

[0155] Like naturally-occurring Cas9 nucleases, any of LFCA Cas, LBCA Cas, LSCA Cas, LPCA Cas and LPCDA Cas or variants thereof as noted above (and functional equivalents thereof, e.g., those represented by a node on the evolutionary route of FIG. 9 or others obtained in accordance with the ancestral reconstruction strategy of the invention) may also be converted to a dCas with no nuclease activity by catalytic site mutagenesis and may further be linked, e.g., fused, with a non-nuclease effector protein.

[0156] Thus, LFCA Cas, LBCA Cas, LSCA Cas, LPCA Cas and LPCDA Cas, variants thereof as discussed above (and functional equivalents thereof, e.g., those represented by a node on the evolutionary route of FIG. 9 or others obtained in accordance with the ancestral reconstruction strategy of the invention) may be employed in the whole panoply of genetic modification techniques envisaged for naturally-occurring Cas9 nucleases of existing species and modified versions thereof. These extend to use in combination with an effector for gene modification or regulation such as a base editor where linkage is via an RNA extension of a guide and an RNA-binding domain as taught in WO 2017/011721 (Rutgers University, licensed to Horizon Discovery). See also Collantes et al., 2021. CRISPR J. 4(1):58-68).

[0157] Preferably, for example, the Cas enzyme variant linked or fused with a non-nuclease effector may be any AnCas obtained in accordance with the invention or variant thereof with nuclease activity which has been modified by conventional catalytic site mutagenesis to have nickase only activity or no nuclease activity, i.e., is a dCas, and exhibits the relaxed PAM specificity observed with, for example LFCA Cas, LBCA Cas and/or LSCA Cas.

[0158] The invention additionally provides nucleic acids for expression of the AnCas proteins described herein, including variants and functional equivalents thereof, e.g., expression vectors for expression of such proteins. Such vectors may be employed with a guide RNA, or guide RNA expressed from DNA. Thus, a combination of vectors providing an AnCas nuclease as herein taught or variant or functional equivalent thereof, and a suitable guide RNA, may be provided for transfection into cells. Such combinations including one or more vectors, including a vector for expression of, e.g., LFCA Cas, LBCA Cas, LSCA Cas, LPCA Cas or LPCDA Cas or a variant or functional equivalent thereof, in human cells, may be provided in the form of a pharmaceutical composition with a pharmaceutically acceptable excipient.

[0159] Preferably the Cas protein may be LFCA Cas or a corresponding nickase. It will be appreciated that the corresponding nickase of any of the ancestral enzymes herein taught may be so provided, e.g., an LBCA nickase, LSCA nickase, LPCA nickase or LPCDA nickase.

[0160] Thus, the present invention further relates to a nucleic acid capable of expressing a Cas nuclease or Cas nuclease variant according to the invention.

[0161] In some embodiments, the nucleic acid is a DNA or an RNA molecule. In some embodiments, the nucleic acid is a DNA molecule, e.g., a complementary DNA molecule. In some embodiments, the nucleic acid is an RNA molecule, e.g., a messenger RNA molecule.

[0162] In some embodiments, the nucleic acid is single stranded or double stranded. In some embodiments, the nucleic acid is single stranded. In some embodiments, the nucleic acid is double stranded.

[0163] In some embodiments, the nucleic acid comprises natural nucleotides. In some embodiments, the nucleic acid comprises a combination of natural and non-natural nucleotides.

[0164] In some embodiments, the nucleic acid is comprised in a vector. Non limitative examples of suitable vectors comprise plasmid, fosmid, cosmid, artificial chromosome or viral vector. In some embodiments, the vector is comprised in a nanoparticle, e.g., a lipid nanoparticle.

[0165] The present invention further relates to a combination of a vector comprising the nucleic acid according to the invention as described hereinabove, and a guide RNA for targeting the Cas nuclease or variant or functional equivalent thereof to a target DNA sequence, or a vector capable of expressing the guide RNA.

[0166] Alternatively, a novel AnCas nuclease as herein taught, such as LFCA Cas, LBCA Cas, LSCA Cas, LPCA Cas or LPCDA Cas or a variant or functional equivalent thereof, e.g., a corresponding nickase as discussed above, may be provided as a ribonucleoprotein (RNP) complex with a guide RNA for transfection into cells, e.g., by electroporation into isolated cells. Thus, the present invention further refers to a ribonucleoprotein complex comprising a Cas nuclease or Cas nuclease variant according to the invention, or a Cas nuclease or Cas nuclease variant and a guide RNA for targeting the Cas nuclease or Cas nuclease variant to a target DNA sequence.

[0167] It will be appreciated that the term “guide RNA” as used herein may be a single molecule targeting RNA (sgRNA) or, if suitable as for a naturally-occurring Cas9, a dual sequence RNA comprising (i) a DNA targeting segment comprising a nucleotide sequence complementary to the target sequence (the crRNA) and (ii) a protein-binding segment that interacts with the Cas protein (the tracrRNA).

[0168] In a further aspect, the invention provides a method for modifying or regulating a target nucleic acid sequence, e.g., a target DNA sequence, the method comprising contacting the target sequence with a complex comprising (i) a Cas protein as taught, e.g., LFCA Cas, LBCA Cas, LSCA Cas, LPCA Cas or LPCDA Cas, or a variant or functional equivalent thereof as discussed above, and (ii) a guide RNA for targeting the Cas protein to the target sequence, wherein either:
[0169] (a) said contacting is in vitro on an isolated target nucleic acid sequence or in a cell ex vivo, preferably with the proviso that methods of modifying the germ line identity of a human being are excluded; and/or
[0170] (b) the method is not a method of medical treatment practiced on the human or animal body.

[0171] The complex may further comprise a nucleic acid molecule encoding a transgene of interest, e.g., for introduction of this transgene of interest into the target DNA sequence.

[0172] Preferably, the Cas protein may be, for example, LFCA Cas, LBCA Cas, or another exemplified AnCas nuclease as noted above, which retains the same relaxed PAM requirement. Preferably, the Cas protein may be such an AnCas but modified to present only a nickase activity or no nuclease activity in the form of a fusion protein.

[0173] Such methods extend for example to genetic modification of human or animal cells ex vivo. Cas proteins as now taught, e.g., LFCA Cas, LBCA Cas and other AnCas, including variants and functional equivalents thereof, may also find use in relation to genetic modification in plants, e.g., by modifying target sequences, possibly but not exclusively, in protoplasts.

[0174] It will be appreciated that the invention also extends to a combination for use in therapeutic treatment by modifying or regulating a target nucleic acid sequence, for example a DNA sequence, wherein the combination comprises:
[0175] (i) a Cas protein as taught herein, e.g., LFCA Cas, LBCA Cas, LSCA Cas, LPCA Cas, or LPCDA Cas, or a variant or functional equivalent thereof as discussed above, or a polynucleotide capable of expressing the same, and
[0176] (ii) a guide RNA for targeting the Cas protein to a target nucleic acid sequence or a polynucleotide capable of expressing the same.

[0177] In particular, therapeutic treatment may include the prevention and/or treatment of genetic diseases. The combination may then further comprise a nucleic acid molecule encoding a transgene of interest, wherein said transgene of interest may, e.g., compensates a gene defect responsible for the genetic disease.

[0178] As indicated above, the low sequence identity of, for example LFCA Cas to SpyCas9, is considered advantageous in relation to contemplating such use. Such use may embrace for example Cas action in pathogenic bacteria or for manipulation of the gut microbiome or skin microbiome.

[0179] The following exemplification illustrates the invention with reference to both obtaining and testing of the Cas enzymes LFCA Cas, LBCA Cas and LSCA Cas, but as noted above it is envisaged that other ancestral Cas proteins with advantageous properties may be obtained by the same strategy depending on the choice of starting population of Cas enzyme sequences providing the phylogenetic tree for the evolutionary analysis. The predicted resurrection may be as old as 3 Bys.

### EXAMPLES

### Example 1

[0180] Ancestral Sequence Reconstruction of Cas Nucleases from Existing Cas9 Sequences

[0181] Sequences were collected of the gene cas9 from the Uniprot database from several Firmicutes bacterial species using as query the sequence SpyCas9 (Uniprot code: Q99ZW2). The search confirmed the existence of hundreds of sequences of cas9 genes from the phylum Firmicutes within the classes Bacilli and Clostridia. Some sequences from Actinobacteria were also found. After downloading 59 sequences (Table 1), a sequence alignment was constructed that confirmed the common origin of the Cas9 sequences with a portion of the sequences showing significant conservation. Using Bayesian inference (BEAST software), a phylogenetic tree was compiled to confirm the phylogenetic relationship of the sequences. Using maximum likelihood, five AnCas sequences were reconstructed to the Last Common Ancestor of Firmicutes (LFCA), going back ˜2.4 Bya (see FIG. 1). The evolutionary path from LFCA Cas to modern Streptococcus pyogenes was followed. LFCA Cas was found to only have around 50% identity with SpyCas9 (over 500 mutations). Other evolutionary routes were constructed such as those leading to Clostridium and Enterococcus species. Genes encoding ancestral Cas enzymes were synthesized, cloned into expression vectors, expressed in E. coli and purified in the lab. Five AnCas enzymes from the route LFCA to S. pyogenes (shown in bold in FIG. 1) were obtained. All 5 were found to be expressed at high levels, folded, and soluble despite sequence identities ranging from about 50 to nearly 95% with SpyCas9.

TABLE 1
Cas9 sequences utilized for ancestral reconstruction of ancient Cas9 variants

| Phylum | Class | Genus | Specie | Sequence |
|---|---|---|---|---|
| Firmicutes | Bacilli | Streptococcus | Streptococcus | WP_084916602.1 |
| | | | dysgalactiae | |
| Firmicutes | Bacilli | Streptococcus | Streptococcus canis | WP_003043819.1 |
| Firmicutes | Bacilli | Streptococcus | Streptococcus | WP_012962174.1 |
| | | | gallolyticus | |
| Firmicutes | Bacilli | Streptococcus | Streptococcus | WP_014334983.1 |
| | | | infantarius | |
| Firmicutes | Bacilli | Streptococcus | Streptococcus | WP_054279288.1 |
| | | | phocae | |
| Firmicutes | Bacilli | Streptococcus | Streptococcus | WP_157339387.1 |
| | | | equinus | |
| Firmicutes | Bacilli | Streptococcus | Streptococcus | WP_061100419 |
| | | | pasteurianus | |
| Firmicutes | Bacilli | Streptococcus | Streptococcus equi | WP_037581760.1 |
| Firmicutes | Bacilli | Streptococcus | Streptococcus | WP_002279859.1 |
| | | | mutans | |
| Firmicutes | Bacilli | Streptococcus | Streptococcus iniae | WP_003099269.1 |
| Firmicutes | Bacilli | Streptococcus | Streptococcus | AFV72233.1 |
| | | | agalactiae | |
| Firmicutes | Bacilli | Streptococcus | Streptococcus | WP_018363470.1 |
| | | | caballi | |
| Firmicutes | Bacilli | Streptococcus | Streptococcus | WP_003041502 |
| | | | anginosus | |
| Firmicutes | Bacilli | Streptococcus | Streptococcus | WP_093650272 |
| | | | varani | |
| Firmicutes | Bacilli | Streptococcus | Streptococcus | WP_082312238.1 |
| | | | intermedius | |
| Firmicutes | Bacilli | Streptococcus | Streptococcus ratti | WP_003088697.1 |
| Firmicutes | Bacilli | Streptococcus | Streptococcus | WP_002906454.1 |
| | | | sanguinis | |
| Firmicutes | Bacilli | Streptococcus | Streptococcus mitis | WP_084927115.1 |
| Firmicutes | Bacilli | Streptococcus | Streptococcus | WP_045635197.1 |
| | | | gordonii | |
| Firmicutes | Bacilli | Streptococcus | Streptococcus suis | WP_044681799.1 |
| Firmicutes | Bacilli | Streptococcus | Streptococcus | WP_002891502.1 |
| | | | salivarius | |
| Firmicutes | Bacilli | Streptococcus | Streptococcus | WP_007896501.1 |
| | | | pseudoporcinus | |
| Firmicutes | Bacilli | Streptococcus | Streptococcus | WP_074484960.1 |
| | | | henryi | |
| Firmicutes | Bacilli | Streptococcus | Streptococcus | WP_065972475.1 |
| | | | thermophilus | |
| Firmicutes | Bacilli | Streptococcus | Streptococcus | WP_076751909.1 |
| | | | parauberis | |
| Firmicutes | Bacilli | Streptococcus | Streptococcus | WP_006269658.1 |
| | | | constellatus | |
| Firmicutes | Bacilli | Streptococcus | Streptococcus | WP_032464890.1 |
| | | | pyogenes | |
| Firmicutes | Bacilli | Streptococcus | Streptococcus | WP_075103982.1 |
| | | | cuniculi | |
| Firmicutes | Bacilli | Enterococcus | Enterococcus | WP_007209003.1 |
| | | | italicus | |
| Firmicutes | Bacilli | Enterococcus | Enterococcus | WP_048604708.1 |
| | | | massiliensis | |
| Firmicutes | Bacilli | Enterococcus | Enterococcus | OJG69383.1 |
| | | | phoeniculicola | |
| Firmicutes | Bacilli | Enterococcus | Enterococcus | NTL99667.1 |
| | | | faecalis | |
| Firmicutes | Bacilli | Enterococcus | Enterococcus | WP_071862060.1 |
| | | | devriesei | |
| Firmicutes | Bacilli | Enterococcus | Enterococcus hirae | WP_096708680.1 |
| Firmicutes | Bacilli | Enterococcus | Enterococcus | WP_087063969.1 |
| | | | faecium | |
| Firmicutes | Bacilli | Enterococcus | Enterococcus | WP_067627992.1 |
| | | | pseudoavium | |
| Firmicutes | Bacilli | Enterococcus | Enterococcus | WP_081134165.1 |
| | | | durans | |
| Firmicutes | Bacilli | Enterococcus | Enterococcus | WP_023519017.1 |
| | | | mundtii | |
| Firmicutes | Bacilli | Vagococcus | Vagococcus fluvialis | WP_086950450.1 |
| Firmicutes | Bacilli | Vagococcus | Vagococcus teuberi | WP_071456514.1 |
| Firmicutes | Bacilli | Listeria | Listeria | WP_003739838.1 |
| | | | monocytogenes | |
| Firmicutes | Bacilli | Listeria | Listeria ivanovii | WP_038409211.1 |
| Firmicutes | Bacilli | Listeria | Listeria innocua | WP_010991369.1 |
| Firmicutes | Bacilli | Listeria | Listeria seeligeri | WP_075702521.1 |
| Firmicutes | Bacilli | Halolactibacillus | Halolactibacillus | WP_089800158.1 |
| | | | alkaliphilus | |
| Firmicutes | Bacilli | Pelagirhabdus | Pelagirhabdus | WP_090793453.1 |
| | | | alkalitolerans | |
| Firmicutes | Bacilli | Dolosigranulum | Dolosigranulum | WP_004636532.1 |
| | | | pigrum | |
| Firmicutes | Bacilli | Anaerostipes | Anaerostipes hadrus | WP_055196588.1 |
| Firmicutes | Bacilli | Floricoccus | Floricoccus tropicus | WP_070791099.1 |
| Firmicutes | Bacilli | Urinacoccus | Urinacoccus | WP_034440723 |
| | | | massiliensis | |
| Firmicutes | Clostridia | Clostridium | Clostridium sp | CDD37961.1 |
| | | | CAG299 | |
| Firmicutes | Clostridia | Clostridium | Clostridium sp | CDC80610.1 |
| | | | CAG964 | |
| Firmicutes | Clostridia | Clostridium | Clostridium sp | CCZ42109.1 |
| | | | CAG122 | |
| Firmicutes | Clostridia | Lachnospira | Lachnospira | WP_027438114.1 |
| | | | multipara | |
| Firmicutes | Clostridia | Ruminococcus | Ruminococcus | WP_005609677.1 |
| | | | lactaris | |
| Firmicutes | Clostridia | Dorea | Dorea longicatena | WP_055214841.1 |
| Actinobacteria | Coriobacteriaceae | Olsonella | Olsenella_DNF00959 | WP_062531800.1 |
| Actinobacteria | Coriobacteriaceae | Olsonella | Olsenella profusa | WP_021725096.1 |
| Actinobacteria | Bifidobacteriaceae | Bifidobacterium | Bifidobacterium | WP_065439263.1 |
| | | | pseudocatenulatum | |

[0182] See the material and methods section below for further information on the evolutionary analysis.

### Testing the Endonuclease Activity of AnCas Enzymes

[0183] To test if the ancestral Cas showed endonuclease activity, a DNA library with 7 random nucleotides (NNNNNNN) was designed and a gRNA to target the sequence after these nucleotides. This random DNA library was needed as the LFCA Cas PAM sequence was unknown (FIG. 2a). The sequences for provision of the random library were cloned in the plasmid pUC18 and a sequence of 844 bp was amplified to produce a linear DNA fragment. SpyCas9 cleavage produces two fragments, one with 566 bp and a smaller one with 278 bp that contains the PAM sequence. Both LFCA Cas and SpyCas9 incubation with gRNA targeting the PCR fragment successfully produced both fragments (FIG. 2b) confirming that the ancestral Cas has catalytic activity. In addition, a DNA fragment containing the S. pyogenes PAM (NGG) extracted from the library by PCR was recognized by both Cas enzymes. LFCA was able to recognize S. pyogenes PAM and cleave the DNA (FIG. 2c).

[0184] To study the DNA cleavage dynamics of LFCA Cas, a DNA fragment containing the S. pyogenes PAM (TGG) was cloned and incubated with LFCA Cas or SpyCas9 at different times ranging from 5 to 160 minutes. Both enzymes were incubated with gRNA and target DNA and the reaction stopped by adding loading buffer and EDTA. The samples were run on a 1%-agarose gel to detect supercoiled, nicked and linear DNA (FIG. 3a). On the agarose gel (FIG. 3b), the different DNA conformations after Cas enzyme activity were observed. The band intensity was measured and the total cleavage by both enzymes at different times was calculated (FIG. 3c). Both enzymes cleaved almost 100% of the plasmid DNA after 10 minutes. However, it was observed that LFCA Cas cuts one strand of the DNA and the other strand cleavage increases with time, i.e., nicking and endonuclease activity were separated in time as shown in FIG. 3d. In comparison SpyCas9 cuts the two strands of DNA simultaneously.

[0185] In another line of experiments, the AnCas genes were synthesized and cloned into pBAD/gIII expression vectors, carrying an arabinose inducible promoter and a gIII-encoding signal that directs the AnCas to the periplasmic space. All AnCas were expressed at high levels in Escherichia coli BL21 cells.

[0186] The activity test was started by assuming a simplistic scenario by which AnCas would recognize a sgRNA from S. pyogenes as well as its canonical 5′-NGG-3′ PAM sequence. An sgRNA containing a 20 nt-long spacer region targeted towards a DNA fragment upstream of a TGG PAM was designed, all placed in a 4007 bp-supercoiled plasmid. In vitro cleavage assays were carried out by incubating AnCas or SpCas9 with target DNA together with the sgRNA at different digestion times. Although with clear differences in cleavage efficiency, all enzymes tested produced both relaxed and linear products, indicative of nickase and DSB activity, respectively. As expected, SpCas9 showed nicked product after short incubation times and linear products after longer incubation times (FIG. 15A). However, in the case of AnCas, the behavior changed from the oldest LFCA AnCas to the more recent enzymes (FIG. 15A). LFCA AnCas mostly showed nickase activity and the DSB activity becomes prominent only at times over 60 minutes. The other AnCas showed a progressive behavior with more intensive DSB activity in the younger AnCas (FIG. 15A). Both the nicked and linear fraction for each AnCas and SpCas9 were quantified and plotted versus incubation time in three forms, total cleavage (FIG. 15B), nicked fraction (FIG. 15A) and linear fraction (FIG. 15D), demonstrating the progressive decrease of nicked fraction and increase of linear fraction. SpCas9 had the higher proportion of linear products, the oldest LFCA AnCas had the highest proportion of nicked fraction. The percentage of linear and nicked products were plotted versus geological time demonstrating an evolutionary trend from nickase to DSB activity (FIG. 15E). The structural differences observed in LFCA AnCas protein related to HNH domain displacement, together with the evolutionary trend from nickase to DSB activity, suggests that the oldest AnCas, LFCA AnCas, could display an ancestral HNH domain with a reduced or suppressed activity. To examine this, the in vitro activity of a H838A LFCA AnCas mutant was tested (H840A with respect to the wild-type SpCas9 amino acid sequence). The mutant was able to produce nicked and, surprisingly, linear products, showing a profile practically identical to that obtained with wild type LFCA AnCas (FIG. 19A-D). These results suggest that LFCA AnCas may contain an immature HNH domain, with the RuvC domain responsible for the nickase and DSB activity observed in LFCA AnCas, as has been previously shown in some type V effector nucleases that lack the HNH domain, such as Cpf1 (Cas12a), Cas14 (Cas12f) or CasΦ (Cas12j)27-30.

TABLE 2
Cas9 nucleases linearization (linear) and nick (nickase) rates:

| | | Negative | |
|---|---|---|---|
| Time before | Linear | Nick rate | Cas |
| present (GYA) | rate (m⁻¹) | (m⁻¹) | Nuclease |
| 0 | 0.199 | −0.61 | SpyCas9 |
| 0.34 | 0.057 | −0.337 | LSCA |
| 1.6 | 0.019 | −0.24 | LBCA |
| 2.7 | 0.0027 | −0.13 | LFCA |

[0187] In another line of experiments, the DNA cleavage activity of two AnCas, LBCA Cas and LSCA Cas, was compared with the DNA cleavage activity of LFCA Cas and SpyCas9.

[0188] A plasmid containing the TGG PAM sequence after the target sequence was incubated with each enzyme for different times. The cleavage rates of the four enzymes were similar (FIG. 10a) when the total cleavage was compared. The linearization and nick rates were however different depending on the enzyme. LBCA Cas and LSCA Cas were shown to have a higher linearization rate than LFCA Cas, but still lower than SpyCas9 (FIG. 10b). In contrast, the nick rates of LBCA Cas and LSCA Cas were lower than that of LFCA Cas, but higher than the nick rate of SpyCas9 (FIG. 10c).

[0189] The cleavage activity of the AnCas enzymes could be seen to follow a trend which is shown in FIG. 11. The percentage of double stranded breaks after an incubation time of 30 minutes can be seen to be highest for SpyCas9 and decreases with the age of ancestral Cas enzymes (i.e., the percentage of double stranded breaks can be seen to decrease with the older the ancestral enzyme as follows: % DSB for SpyCas9>% DSB for LSCA Cas>% DSB for LBCA Cas>% DSB for LFCA Cas).

[0190] The opposite correlation was seen for percentage of nicked template formed (i.e., % nicked cleavage for SpyCas9<% nicked cleavage for LSCA Cas<% nicked cleavage for LBCA Cas<% nicked cleavage for LFCA Cas).

[0191] By converting the percentages of DSBs and nicked template shown in FIG. 11 to a time-dependent value, a linearization rate and nick rate could be calculated and plotted. The linearization and nick rates seem to follow a trend which is seen when the rates are plotted versus the age of each ancestor (FIG. 12).

### PAM Determination

[0192] A DNA fragment amplified by PCR from a DNA library as described in the PAM library construction section below was used to determine the PAM specificity of LFCA Cas. The LFCA Cas with gRNA and the DNA library were incubated for 1 hour and the reaction products run in a 2%-agarose gel. The small fragment of 278 bp was extracted from the agarose gel and was analyzed by Ion Torrent Next Generation Sequencing (NGS). From the sequencing data, the frequency of each PAM recognized by LFCA Cas was analyzed and the total proportion against the overall frequency of each PAM in the library was calculated. The calculated frequencies were plotted in a PAM wheel to visualize the PAM affinity of the ancestral Cas (FIG. 4a). The wheel shows the loss of PAM preference of LFCA Cas compared with SpyCas9.

[0193] To confirm this result, an in vitro-PAM determination assay was carried out with a DNA plasmid carrying a target DNA with different PAM combinations (TNN 3 nucleotide combinations and CCC). LFCA and SpyCas9 (10 nM) incubated for 10 minutes with each PAM had different cleavage activities. LFCA Cas showed similar nicking activity with all the PAMs tested. In contrast, SpyCas9 showed cleavage with the TGG PAM (its well-known canonical PAM sequence), and showed lower cleavage than LFCA Cas with the other PAMs (FIG. 4b).

[0194] In another line of experiments, the ability of the AnCas endonucleases to recognize different PAMs was investigated. To determine the preferred PAM sequence of each AnCas, a DNA library containing a target sequence followed by seven random nucleotides (NNNNNNN) that corresponded to all possible PAMs was designed. An sgRNA was designed using the scaffold of S. pyogenes and 20 nucleotides complementary to the target sequence. PCR primers were designed to amplify an 844 bp-fragment containing both the target and PAM sequence, which was used as a substrate for AnCas and SpCas9. In vitro digestion using the purified Cas protein, and the transcribed sgRNA, was performed with the PCR target. All five AnCas produced two fragments, one of 566 bp and a smaller one of 278 bp that would contain the PAM sequences recognized by the AnCas. The small fragment was purified, sequenced by Next-generation Sequencing (NGS) and analyzed to determine PAM sequence diversity from each AnCas, enabling to infer how evolution changed it. FIG. 16A summarizes the results of PCR cleavage assay in the form of PAM wheels (Krona plot) for the five AnCas and SpCas9. As previously observed, LFCA AnCas exhibited no preference for any PAM sequence tested. For the other Cas proteins, a preference for specific nucleotides in the target-proximal positions 2 and 3 was detected (FIG. 22). For instance, in the case of LBCA AnCas, a slight preference for NGG was revealed, although additional PAM sequences were also detected (NNG). For more recent AnCas, the NGG bias was more pronounced (data not shown).

[0195] After analyzing all the sequences, the percentage of reads with an NGG PAM were plotted versus the geological time of each AnCas, as estimated in the phylogenetic analysis. A trend that reflects an NGG enrichment over time was observed, demonstrating that NGG fidelity is an evolutionary trait that portrays a gradual progression from PAMless to NGG preference in more recent Streptococci ancestors (FIG. 16B). This confirms the hypothesis of an evolving adaptive response for PAM recognition, which would be expected as the number of spacers acquired by the host cell increases over time. Eventually, a strong PAM recognition ability would be required to avoid self-cleavage of the CRISPR locus, especially, in a scenario in which the increment of DSB activity (deleterious in most prokaryotes) over nickase activity might further increase the evolutionary pressure on this ability. Although PAM-permissive (or “near-PAMless”) Cas9 variants have been previously described, LFCA AnCas is the first fully PAMless Cas9 endonuclease ever reported to our knowledge.

[0196] To further probe the PAMless ability of LFCA AnCas, an in vitro-PAM determination assay was designed to test cleavage of a target DNAs adjacent to a total of six PAM sequences (TAC, TCC, TAT, TTT, TTC and TAC) within the general TNN PAM. A CCC PAM was also included in the set to verify possibilities other than an initial T nucleotide. AnCas effectors together with the sgRNA were incubated with each of the target DNAs for 10 minutes and cleavage products were verified by agarose gel (data not shown). Both nicked and linear products were observed, demonstrating the cleavage activity with all TNN PAM sequences. In the case of SpCas9, only TGG PAM demonstrated double-stranded break of the supercoiled DNA substrate. The percentage of nicked and linear products was quantified for each PAM, represented in FIG. 16C. For the oldest AnCas (LFCA Cas and LBCA Cas), the percentage of cleavage was similar for all PAM sequences tested, with mostly nicked products, as expected given the incubation time. In the case of younger AnCas and SpCas9, the cleavage fraction reached high levels for TGG PAM, corroborating the NGG PAM preference. In the case of CCC control, the cleavage profile was similar to those obtained from non-NGG PAM sequences.

[0197] In another line of experiments, PAM determination was carried out using DNA fragments amplified by PCR from a DNA library again as described in the PAM library construction section below. LBCA Cas or LSCA Cas were incubated with gRNA and the DNA library for 1 hour with run of the reaction in a 2%-agarose gel. A small fragment of 278 bp was extracted from the agarose gel and analyzed by Ion Torrent Next Generation Sequencing (NGS). From the sequencing data the frequency of each PAM recognized by the AnCas enzyme was determined and the total proportion against the overall frequency of each PAM in the library was calculated. The calculated frequencies were plotted in a PAM wheel to visualize the PAM affinity for both AnCas (FIG. 13a). The wheel shows similar PAM preference of LBCA and LSCA Cas as exhibited by LFCA Cas.

[0198] A PAM determination assay was performed in vitro with a DNA plasmid carrying a target DNA with different PAM nucleotide combinations (TNN). LBCA Cas and LSCA Cas (10 nM) were incubated for 10 mins with each PAM (FIG. 13b). LBCA Cas showed a similar cleavage rate or even higher with some PAMs than LFCA Cas. LSCA Cas also showed cleavage with all the PAM sequences tested but has lower activity. A higher linear activity throughout for all the PAMs tested was seen compared with LFCA Cas, highlighting the higher linear cleavage rate of LBCA Cas and LSCA Cas.

[0199] Finally, we wanted to compare the PAM preferences for LFCA Cas (which has no preference for any PAM sequence as demonstrated above) and for LBCA Cas (which was shown to be near-PAMless with a preference for NNG sequence), versus Cas9 proteins disclosed in the art, in particular:
[0200] a so-called “ancestral Cas9 protein” disclosed in WO 2021/084533 A1 (SEQ ID NO: 268 of WO′533); and
[0201] the near-PAMless Cas9 proteins “SpG”* and “SpRY” ** of Walton et al. (2020. Science. 368(6488):290-296).

### * SpG: D1135L/S1136W/G1218K/E1219Q/R1335Q/T1337R

### ** SpRY: A61R/L1111R/D1135L/S1136W/G1218K/E1219Q/N1317R/A1322R/R1333 P/R1335Q/T1337R

[0202] In all cases, a wild-type SpCas9 control was included to benchmark.

[0203] A DNA library containing seven random nucleotides was designed and cloned into pUC18 plasmids (Genscript). This random library was transformed in XL1blue Escherichia coli and amplified several times to achieve the maximal variability in the PAM sequences.

[0204] PAM determination assay was performed by incubating 3 nM of DNA library plasmid with 30 nM of each tested Cas protein in cleavage buffer, together with a gRNA targeting the 20 nucleotides upstream of the 7 random nucleotides. The reaction was incubated for 1 hour at 37° C. and stopped by adding 6× loading dye (NEB) with EDTA and run on 2% agarose gel. Gels were dyed with SYBR gold (ThermoFisher Scientific) and imaged on a ChemiDoc XRS+ System (Bio-Rad). PAM library-specific PCR-based amplification was performed using adapters and specific oligos:

| | SEQ ID NO | Sequence |
|---|---|---|
| P5_2 | 240 | AATGATACGGCGACC |
| | | ACCGAGATCTACAC |
| P705 | 241 | CAAGCAGAAGACGGC |
| | | ATACGAGATAGGAGT |
| | | CCGTGACTGGAGTCC |
| | | TCTCTATGGGCAGTC |
| | | GGTGA |
| P706 | 242 | CAAGCAGAAGACGGC |
| | | ATACGAGATCATGCC |
| | | TAGTGACTGGAGTCC |
| | | TCTCTATGGGCAGTC |
| | | GGTGA |
| P707 | 243 | CAAGCAGAAGACGGC |
| | | ATACGAGATGTAGAG |
| | | AGGTGACTGGAGTCC |
| | | TCTCTATGGGCAGTC |
| | | GGTGA |
| P708 | 244 | CAAGCAGAAGACGGC |
| | | ATACGAGATCCTCTC |
| | | TGGTGACTGGAGTCC |
| | | TCTCTATGGGCAGTC |
| | | GGTGA |
| Index1 | 245 | ATCACCGACTGCCCA |
| | | TAGAGAGGACTCCAG |
| | | TCAC |
| Read2 | 246 | GTGACTGGAGTCCTC |
| | | TCTATGGGCAGTCGG |
| | | TGAT |

[0205] The fragment was sequenced by Illumina sequencing and the reads were mapped to the reference sequence using Geneious Prime (2020 version). Illumina miSeq reads were aligned against amplified sequence with minimap2 for short reads to filter unspecific sequences. Then, reads with 3 nucleotides before the PAM region were selected from the aligned reads. The nucleotides in the region of interest were extracted using a custom script. Finally, logo plots of the PAM region were obtained with ggseqlogo and the PAM wheel of each sample was graphically represented with KronaTools.

[0206] Our data showed that, among the 6 different Cas proteins that were tested, only LFCA Cas was totally PAMless. LBCA Cas was the second Cas protein with the least restrictive PAM requirement. All other Cas proteins had more restrictive PAM preferences (FIG. 24).

[0207] Interestingly, the so-called “ancestral Cas9 protein” disclosed in WO 2021/084533 A1 displayed a NGG PAM requirement, identical to that of wild-type SpCas9.

[0208] These data therefore confirm that our AnCas proteins are truly PAMless or at least near-PAMless, contrary to the those disclosed in the art.

gRNA Recognition

[0209] The promiscuity for PAM recognition exhibited by the oldest AnCas raised the question of whether these AnCas would also show promiscuity towards gRNA recognition as well. The reconstruction of an ancestral gRNA would have been ideal; however, the variability in sequence of crRNA repeats and tracrRNA from different species makes this very difficult. To overcome this limitation and still evaluate the promiscuity of AnCas, modern sgRNAs from different species were tested. A total of five sgRNAs were selected from Streptococcus thermophilus, Enterococcus faecium, Clostridium perfingens, Staphylococcus aureus and Finegoldia magna, covering several Firmicutes classes. These sgRNAs were selected following previous studies on sgRNA classification and function, in which sgRNAs were divided into seven clusters. These distinct sgRNAs were contrasted against S. pyogenes guides containing spacers of two sizes, 18 and 20-nucleotide long, referred as “18 sgRNA” and “20 nt sgRNA”, respectively.

[0210] SpCas9 and the five AnCas were incubated for 10 minutes at 37° C. with a target plasmid DNA and TGG PAM recognition. From the agarose gel of cleavage products in FIG. 17A, it can be observed that, as expected, SpCas9 only linearized plasmid DNA when using its own sgRNA, although more efficiently when using the 20 nt spacer version, and sgRNAs from other species mostly resulted in nicked products leaving most supercoiled DNA substrate intact. On the contrary, LFCA Cas and LBCA Cas were able to nick and linearize plasmid DNA with all sgRNAs, the E. faecium sgRNA showing better efficiency for LFCA Cas, and the 18 nt sgRNA from S. pyogenes preferred for LBCA Cas. The other AnCas were also tested, observing that mostly LFCA Cas and LBCA Cas had a marked promiscuity for sgRNA. All other AnCas and SpCas9 seemed to work best with a 20 nt sgRNA from S. pyogenes (FIG. 17B).

[0211] Previous studies have indicated the contribution of the REC domain to sgRNA recognition specificity. As shown in Table 3, this domain exhibits the highest RMSD differences, with a decreasing RMSD trend from the oldest to the newest AnCas. These findings, along with the sgRNA promiscuity observed in oldest AnCas, suggest that evolutionary pressure might have guided Cas nucleases to an enhanced guide specificity over time. In fact, this promiscuity has been already observed in type II-C Cas9, which has been suggested to be an ancient reminiscence of Cas9 nucleases. In these nucleases, this promiscuity is also associated to PAM-independent ssDNA cleavage and weaker substrate DNA unwinding capabilities.

TABLE 3
RMSD values of different SpCas9 protein
domains obtained from AnCas

| | LFCA | LBCA | LSCA | LPCA | LPDCA |
|---|---|---|---|---|---|
| Domains | AnCas | AnCas | AnCas | AnCas | AnCas |
| RuvCI | 0.5820 | 0.3722 | 0.3414 | 0.3415 | 0.3617 |
| BH | 0.5877 | 0.3153 | 0.3453 | 0.3240 | 0.3272 |
| REC1 | 0.8105 | 0.5504 | 0.6405 | 0.5821 | 0.4768 |
| REC2 | 1.6140 | 0.8739 | 0.3722 | 0.5694 | 0.5194 |
| REC | 2.9309 | 1.1052 | 1.0937 | 0.9087 | 1.1426 |
| RUVC II | 0.8643 | 0.7294 | 0.6052 | 0.7951 | 0.7577 |
| HNH | 1.1783 | 0.8971 | 0.8710 | 0.9024 | 0.7063 |
| RUVC III | 2.1138 | 1.0338 | 1.0573 | 1.1097 | 0.9155 |
| PI | 1.9637 | 1.1284 | 1.0394 | 0.9443 | 0.7475 |

[0212] In another line of experiments, using the same in vitro plasmid cleavage assay as noted above, the ability of LFCA Cas to use sgRNAs with a targeting sequence linked to various tracrRNA sequences was investigated. TracrRNA sequences were employed corresponding to the tracrRNA components employed by Cas9 gRNAs of various existing bacterial species. Thus, a plasmid was provided including the S. pyogenes PAM TGG. It was incubated either with SpyCas9 or LFCA Cas in the presence of sgRNA having a tracrRNA derived from each of the bacterial species Streptococcus thermophilus, Enterococcus faceium, Clostridium perfringens and Finegoldia magna or a S. pyogenes sgRNA with normal 20 nt-spacer or shortened 18 nt-spacer. For further information on the gRNA sequences employed, reference may be made to Gasiunas et al., 2020 (Nat Commun. 11(1):5512; see supplementary data providing gRNA sequences of identified Cas9 orthologs). Following incubation, the reaction products were run on an agarose gel and the degree of supercoiled, nicked and linear DNA observed. The gel results are shown in FIG. 8. It is evident that LFCA Cas9 has very flexible gRNA use. It was able to nick or linearize the plasmid DNA regardless of the tracrRNA element of the gRNA employed. Indeed, improved cleavage was seen with some sgRNAs other than a conventional S. pyogenes sgRNA. Such gRNA flexibility is not shown for SpyCas9 and, as indicated above, is believed to be another novel property of LFCA Cas.

### Thermal and pH Stability

[0213] The thermal stability of LFCA Cas was studied by performing a cleavage reaction for 1 hour at pH 7.9 and at different temperatures ranging from 4° C. to 60° C. LFCA Cas showed higher activity than SpyCas9 at low temperatures (4° C. and 20° C.) and presented higher thermal stability from 53° C. to 60° C. (FIG. 5a). The nicking and endonuclease activities were calculated and it was observed that LFCA Cas had nicking activity at lower temperatures; at higher temperatures, the two activities were equally distributed (FIG. 5b).

[0214] For assessment of pH stability, the assay was performed at different pH values (from 4 to 9.5) at 37° C. (FIG. 5c). At acidic pH, LFCA Cas maintained higher activity in comparison to SpyCas9. At alkaline pH, the activity of LFCA Cas remained the same and SpyCas9 showed its optimal performance. As regards nicking and endonuclease activity, the pH affects the activities in a similar way as temperature (FIG. 5d). These results show the high stability that, in general, ancestral enzymes possess.

[0215] As mentioned above, AnCas, in particular LFCA AnCas, might share some commonalities with type V effector nucleases lacking a HNH domain (e.g., Cpf1 (Cas12a), Cas14 (Cas12f) or CasΦ (Cas12j)27-30). Given those numerous ancestral enzymes have demonstrated the ability to work in wider pH and temperature ranges, so indicating later adaptation to environmental conditions, the AnCas nucleases were tested in another line of experiments under different temperature and pH conditions. As shown in FIG. 21A-B, the oldest AnCas such as LFCA Cas, LBCA Cas and LSCA Cas showed high activity at pH values below 7, unlike SpCas9 and newer AnCas, where activity drops abruptly. In terms of temperature, AnCas endonucleases outperformed SpCas9 at low and high temperatures, below 10° C. and above 50° C.

### HEK293T Cell Genome Editing by LFCA Cas

[0216] HEK293T cells were transfected with an expression plasmid carrying an LFCA Cas humanized gene to study the ancestral enzyme effectiveness at editing genomic DNA. A gRNA to target the AAVS1 locus with S. pyogenes PAM was designed. The expression plasmid with encoded LFCA Cas was co-transfected with another plasmid to express the gRNA (FIG. 6a).

[0217] Then, the genomic DNA was extracted to study the insertion and deletion events (indels). Intracellular LFCA Cas expression was confirmed by making an immunofluorescent image of the cells using an anti-Cas9 antibody (orange) (FIG. 6b). The cell nucleus was dyed blue by DAPI. Cells were observed that expressed the LFCA Cas in the nucleus, in the same way as SpyCas9. The genomic DNA was extracted from the HEK293T cells after 72 hours of transfection and a fragment of the AAVS1 locus was amplified where the Cas enzyme cleavage was targeted.

[0218] A T7E1 endonuclease assay was performed with these fragments to confirm genome editing (FIG. 6c). After T7E1 incubation, the two expected fragments were observed, confirming indel formation after LFCA Cas transfection. The same was observed with intracellular expression of SpyCas9 as control.

[0219] In addition, knock-in activity after LFCA Cas and SpyCas9 genome cleavage was studied. The same strategy as in the previous experiment was followed, but a DNA template containing the eGFP gene flanked by homologous sequence to the AAVS1 locus was added to promote homologous end joining (HDR) (FIG. 6d). 72 hours after transfection, cells presented green fluorescence (FIG. 6e). The quantified fluorescence intensity showed higher values in the cells transfected with LFCA Cas (FIG. 6f).

[0220] A similar knock-in experiment targeting the AAVS1 region was carried out but using a different PAM than that of SpyCas9. In this experiment, the TTC PAM was targeted (FIG. 7). Cells were transfected with a gRNA and LFCA Cas or SpyCas9. Fluorescence was observed after 72 hours in all the samples from the DNA template (some transient fluorescence in the TTC sample with SpyCas9). The gDNA was extracted and the AAVS1 locus was amplified. The PCR amplicons were run on a gel. The expected band in all the LFCA Cas samples was observed but not in samples with SpyCas9. The gDNA was extracted and amplified at the AAVS1 locus. The PCRs amplicon were run on an electrophoresis gel and the expected band was observed in all the samples apart from the TTC PAM targeted with SpyCas9 as expected.

### Example 2: Endonuclease Activity on Single Strand DNA and Single Strand RNA

[0221] As mentioned above, the oldest AnCas (LFCA Cas and LBCA Cas) showed a remarkable nickase activity. This nickase activity may be related to ssDNA activity. ssDNA cutting activity has been suggested to be an ancestral trait present in smaller Cas9 such as subtype II-C Cas9. This could also be reflected in the nickase activity of the ancestral forms from subtype II-A, such as AnCas. Earlier forms of Cas9 with smaller catalytic domains might have been the origin of this ssDNA cutting activity that was still present in larger ancestral nucleases, which then gradually evolved towards DSB activity over time as part of a specialization process.

[0222] The activity of the ancestral Cas9 enzymes (LFCA Cas, LBCA Cas and LSCA Cas) on a single-stranded DNA was tested. The single-stranded plasmid m13mp18 linearized by EcoRI restriction enzyme was used as a substrate. The AnCas enzymes and SpyCas9 were each incubated with the plasmid and a gRNA designed to target the plasmid. As control, the DNA and enzyme (but no gRNA) were incubated together (FIG. 14). The three ancestral enzymes were found to cleave the single-stranded DNA with or without gRNA. A similar activity was seen with SpyCas9 when manganese was present in the reaction. The LSCA Cas showed the highest cleavage rate for the single-stranded DNA.

[0223] In another line of experiments, the oldest AnCas were tested with a 85 nt-ssDNA substrate containing a target sequence complementary to the 20 nt-spacer region of a Spy-sgRNA. As shown in FIGS. 17C and 17E, LFCA Cas and LBCA Cas showed highest levels of ssDNA cleavage than those of SpCas9. Exponential fits to the data showed much faster rates for LFCA Cas and LBCA Cas, reaching almost full cleavage for LBCA Cas (Table 4). Activity was tested on a 60 nt-ssRNA target showing comparable results (FIGS. 17D and 17F). Exponential fits of the cleavage activity revealed maximum rate and amplitude for LBCA Cas, reaching again full cleavage (Table 4). These results demonstrate that both ancient LFCA Cas and LBCA Cas, and in particular LBCA Cas, behave as RNA-guided RNAses.

[0224] The activity of the oldest AnCas on single-stranded substrates suggests that early Cas nucleases might have been active on those substrates, which seems to be an ancient trait, as mentioned before. These abilities may have additional important implication, given that the remarkable activity of LBCA Cas on ssDNA and ssRNA resembles that of Cas12a, Cas14 and Cas13a, which suggest a connection among the activities of all class 1 effector nucleases. This functional promiscuity also puts LBCA Cas forward as a highly versatile endonuclease for genome editing applications.

[0225] It was further investigated whether the oldest AnCas endonucleases, which display more promiscuous features, may also have a different response towards an anti-Cas9 antibody. LBCA Cas and LFCA Cas were incubated with an anti-Cas9 rabbit antibody. An ELISA test showed a diminished antibody binding (FIG. 17g). This would be expected given that host organisms carrying these nucleases have been long extinct and therefore have not been in contact with any living organisms. It can be reasoned that antibodies against Cas9 may have a weaker response towards ancient Cas forms. This lower antibody response might be of interest for potential applications in in vivo editing, where the immune response towards SpCas9 and other modern endonucleases represents a current limitation.

TABLE 4
Kinetics parameters of LFCA and LBCA AnCas and SpCas9 determined
from the single exponential decay curves in FIG. 17E and 17F.

| Kinetics | SpCas9 | | LFCA AnCas | | LBCA AnCas | |
|---|---|---|---|---|---|---|
| parameters | ssRNA | ssDNA | ssRNA | ssDNA | ssRNA | ssDNA |
| k_{cleave} (min⁻¹) | 0.016 ± 0.009 | 0.002 ± 0.008 | 0.002 ± 0.01 | 0.045 ± 0.01 | 0.014 ± 0.006 | 0.045 ± 0.02 |
| Max fraction | 0.43 | 0.41 | 0.66 | 0.70 | 0.97 | 0.99 |
| R² | 0.9856 | 0.9902 | 0.9807 | 0.9824 | 0.9954 | 0.9529 |

### Example 3: In Vivo Activity of AnCas Variants

[0226] The genome editing activity of these ancestral nucleases was tested in mammalian cells (HEK293T) in culture, to answer the question whether these synthetic ancestral Cas can perform DNA cleavage; double strand breaks (DSB), and trigger editing in cells by non-homologous end joining (NHEJ) under similar conditions as those associated with the standard SpCas9. The cells were co-transfected with plasmid vectors containing the humanized versions of AnCas or SpCas9, as well as the corresponding sgRNAs (standard sgRNA from S. pyogenes carrying a 20-nt spacer target with SEQ ID NO: 237 to 239).

[0227] Seventy-two hours after co-transfection, cells were collected and the genomic DNA extracted. In vitro site-specific editing was measured in the HEK293T cells by Next-generation Sequencing (NGS) using advanced analysis with Mosaic finder software.

[0228] As shown in FIG. 18, AnCas endonucleases performed robust gene editing in human genomic DNA, except for LFCA Cas. This was expectable given the unique features of LFCA Cas, which presumably does not use the HNH domain for cleavage and seems to work better in single-stranded substrates, akin to other types of Cas nucleases.

[0229] Site-specific cleavage was tested using a Traffic Light Reporter (TLR) based on RFP reconstitution. This method allows monitoring of DNA repair in HEK293T cells based on fluorescence activated cell sorting (FACS). Using again conditions optimized for SpCas9, the results were in line with those determined by NGS (FIG. 23), demonstrating their robustness.

### Materials and Methods

### Ancestral Sequence Reconstruction

[0230] The starting Cas9 sequences as noted above and listed in Table 1 and FIGS. 1 and 9 were downloaded from the NCBI database. Alignment of the sequences was performed using MUSCLE software on the MEGA platform and manually edited. The best evolutionary model was inferred using MEGA, resulting in the Jones-Tylor-Thornton (JTT) with gamma distribution model. Phylogeny was carried out using BEAST v1.8.4 package software including the BEAGLE library for parallel processing and based on Bayesian inference using Markov Chain Monte Carlo (MCMC). The divergence times were estimated by uncorrelated log-normal clock model (UCLN), using molecular information from TTOL with default birth and death rates. Calculations were run in a multicore server. From the generated trees, 25% of them were discarded as burn-in with the LogCombiner utility from BEAST. The MCMC log file was verified using TRACER and it was ensured that all parameters showed effective sample size (ESS)>100. Posterior probabilities of all nodes were above 0.65 and most of them were near 1. Figure tree v1.4.2 was used to visualize and edit the phylogenetic tree. Finally, ancestral sequence reconstruction was performed by maximum likelihood using PAML 4.8 with a gamma distribution for variable replacement rates across sites and the JTT model. Posterior probabilities were calculated for all amino acids and the residue with the highest posterior probability was chosen for each site. The Last Firmicute Common Ancestor (LFCA), Last Bacilli Common Ancestor (LBCA, Last Streptococci Common Ancestor (LSCA),

[0231] Last Pyogenic Common Ancestor (LPCA), Last Pyogenic-Dysgalactie Common Ancestor (LPDCA) were selected from the tree for reconstruction.

[0232] The node sequences identified by the method described above are set out in the sequence listing provided with this application which is expressly incorporated herein in its entirety.

### Protein Production and Purification

[0233] An LFCA Cas coding sequence was synthesized with codon optimization for E. coli cell expression. The coding sequence was cloned in a pBAD/His expression vector (ThermoFisher) and transformed in E. coli BL21 (DE3) (Life Technologies) for protein expression. A SpyCas9 expression plasmid was purchased from Addgene (Plasmid #62934). Cells were incubated in LB medium at 37° C. until OD600 reached 0.6. L-arabinose was added to 0.1% to cells for expression of LFCA Cas and IPTG was added to 1 mM to cells for expression of SpyCas9 with protein induction overnight at 20° C. Cells were pelleted by centrifugation at 4000 rpm. Pellets were resuspended in extraction buffer (20 mM HEPES pH 7.5, 300 mM NaCl, 25 mM Imidazole, 0.5 mM TCEP). 100 mg/ml of lysozyme (Thermo Scientific) was added to the pellet with incubation for 15 mins. Then the pellet was sonicated for 3 cycles for 10 mins at 30% amplitude. Cell debris was separated by ultracentrifugation at 33,000 g for 1 h. For purification, the supernatants were mixed with a His GraviTrap affinity column (GE Healthcare) and eluted with elution buffer (20 mM HEPES pH 7.5, 300 mM NaCl, 500 mM Imidazole, 0.5 mM TCEP). Proteins were further purified by size exclusion chromatography using a Superdex 200 HR column (GE Healthcare) and eluted in 20 mM HEPES pH 7.5, 1 M KCl, 10 mM MgCl₂, 0.5 mM TCEP. For protein purification verification, SDS-PAGE was used with 8% gels. The protein concentration was calculated by measuring the absorbance at 280 nm in Nanodrop 2000C.

gRNA Synthesis

[0234] gRNA with the complementary sequence to the target was synthesized and cloned into a pUC18 vector. gRNA sequence was amplified by PCR using Phusion® Hot Start Flex DNA Polymerase (NEB). PCR product was purified using mi-PCR Purification Kit (Metabion). gRNA was synthesized using HiScribe T7 High Yield RNA Synthesis Kit (NEB). The PCR fragment had the T7 promoter at the 5′ end and the sequence from sgRNA of S. pyogenes at the 3′ end. The reaction was incubated overnight and sgRNA was purified following the protocol of the kit Monarch® RNA Purification Columns. gRNA integrity was analysed by electrophoresis with 2% agarose gel with TBE buffer.

### In Vitro Cleavage Assay

[0235] In vitro cleavage assay was performed with purified LFCA Cas and SpyCas9. In all the assays, 30 nM Cas nuclease was incubated for 15 mins with 30 nM gRNA at 1:1 ratio in the cleavage buffer (100 mM NaCl, 50 mM Tris-HCl, 10 mM MgCl₂, 100 μg BSA, pH 7.9) at 37° C. Then, 3 nM target DNA was added and incubated for different times depending on the experiment. Reaction was stopped by adding 6× loading dye (NEB) with EDTA and the final reaction products run on a 2% agarose gel. Gels were dyed with SYBR gold (ThermoFisher) and imaged with ChemiDoc XRS+System (Bio-Rad). Cleavage was quantified by ImageJ.

### In Vitro Thermal and pH Stability.

[0236] The assay was performed following the previously explained protocol for in vitro cleavage but changing the conditions. For thermal stability, the assays were performed at pH 7.9 with the temperature varied from 4° to 60° C. For pH stability, the assays were performed at 37° C. and the pH was changed from 4 to 9.5. After 1 hour, the reaction was stopped by adding 6× loading dye (NEB) with EDTA and the final reaction products run on a 2% agarose gel. Gels were dyed with SYBR gold (ThermoFisher) and imaged with ChemiDoc XRS+System (Bio-Rad). Cleavage was quantified by imageJ.

### PAM Library Construction

[0237] A DNA library containing 7 random nucleotides was designed and cloned into a pUC18 plasmid by Genscript. This random library was transformed in XL1blue E. coli and amplified several times to achieve the maximal variability in the PAM sequences. A PCR fragment of 844 bp was amplified using the primers (F′ AATAGGCGTATCACGAGGC (SEQ ID NO: 6) and R′ AGCGAGTCAGTGAGCGAG (SEQ ID NO: 7) from the DNA library and containing the 7 random nucleotides.

### PAM Determination

[0238] PAM determination assay was performed by incubating in cleavage buffer: 3 nM of PCR fragment from the DNA library with 30 nM of LFCA Cas and 30 nM of gRNA targeting the 20 nucleotides upstream the 7 random nucleotides. The reaction was incubated for 1 hour at 37° C. Reaction was stopped by adding 6× loading dye (NEB) with EDTA and the final reaction products run on a 2% agarose gel. Gels were dyed with SYBR gold (ThermoFisher) and imaged with ChemiDoc XRS+System (Bio-Rad). The small fragment of 278 bp was purified from the agarose gel with GeneJet Gel Extraction kit (ThermoFisher). The fragment was sequenced by Ion Torrent and the obtained reads were mapped in the reference sequence. The reads that aligned to the reference with 0 mismatches were selected and the frequency was calculated for each PAM.

### HEK293T Cell Genome Editing

[0239] Cells were maintained in DMEN+10% FBS medium supplemented with 1% (w/v) L-glutamine and penicillin-streptomycin (100 IU/ml). Humanized coding sequences for LFCA Cas and SpyCas9 were cloned in a pCDNA 3.1 (ThermoFisher) expression vector and gRNA was cloned in a TOPO vector (ThermoFisher). Plasmids were incubated with lipofectamine LTX (ThermoFisher) for 5 minutes and co-transfected into cells. The medium was changed after 24 hours transfection and cells were collected after 72 hours. gDNA was extracted from cells using DNAzol Reagent (ThermoFisher) according to the manufacturer's protocol. DNA target was amplified by PCR using Phusion® Hot Start Flex DNA Polymerase (NEB) using primers (F′ TATTGTTCCTCCGTGCGTCAG (SEQ ID NO: 8) and R′GACGAGAAACACAGCCCCA (SEQ ID NO: 9)) from gDNA.

[0240] The T7EI assay was performed using as substrate these PCR amplicons to confirm indel formation. The T7E1 endonuclease (NEB) was used according to the manufacturer's protocol. Reaction was stopped by adding 6× loading dye (NEB) with EDTA and the final reaction products run on a 2% agarose gel. Gels were dyed with SYBR gold (ThermoFisher) and imaged with ChemiDoc XRS+System (Bio-Rad).

[0241] For knock-in experiments the same strategy was used, but a double stranded DNA template containing the eGFP gene and CMV promoter flanked by 500 bp homologous arms of the AAVS1 locus was utilised. After 72 hours the immunofluorescence was quantified by confocal microscopy.

### Immunofluorescence Studies

[0242] HEK293T cells were fixed with 4% paraformaldehyde for 30 mins after 24 hours of LFCA Cas and SpyCas9 plasmid transfection. Cells were incubated with 0.2% Triton X-100/PBS at RT for 30 mins and then incubated for 1 hour with 3% BSA, 0.05% Tween 20 for the blocking step. Cells were washed 3 times with TPBS (0.05% Tween-PBS) and incubated for 1 hour at 37° C. with a polyclonal anti-Cas9 antibody (1:100, 600-401-GK0. Thermofisher). Cells were washed 3 times with TPBS and incubated for 10 mins with a secondary antibody (goat anti-rabbit labelled with Alexa Fluor 555. 1:200, A-21428, Thermofisher). DAPI was added in this step and cells were washed one last time and visualized by confocal microscopy.

In Vitro Cleavage Assay for gRNA Promiscuity.

[0243] For in vitro cleavage for gRNA promiscuity, DNA plasmid carrying TGG PAM was used. The cleavage assay was performed in cleavage buffer (100 mM NaCl, 50 mM Tris-HCl, 10 mM MgCl₂, 100 μg/BSA, pH 7.9) at 37° C. 3 nM of AnCas and SpCas9 were incubated for 15 min with 3 nM sgRNA of each species at 1:1 ratio in cleavage buffer and 3 nM DNA plasmid was added. After 10 min, the reaction was stopped by adding 6× loading dye (NEB) with EDTA and run 2% agarose gel. Similarly, gels were dyed with SYBR gold (ThermoFisher Scientific) and imaged with ChemiDoc XRS+System (Bio-Rad). Cleavage was quantified by ImageJ.

In Vitro Cleavage Assay for ssDNA and ssRNA.

[0244] In vitro cleavage assay was performed with purified LFCA (FCA) AnCas, LBCA (BCA) AnCas and SpCas9 endonucleases. In all assays, 30 nM enzyme was incubated for 15 min with 30 nM sgRNA (Spy-sgRNA 20 nt) at 1:1 ratio in the cleavage buffer (100 mM NaCl, 50 mM Tris-HCl, 10 mM MgCl₂, 100 μg/BSA, pH 7.9) at 37° C. Then, 3 nM target (ssDNA or ssRNA) was added and incubated for different time intervals (0, 5, 10, 30 and 60 min). For ssDNA target, reaction was stopped by adding 6× loading dye (NEB) with urea. Samples were boiled for 10 min at 80° C. and were resolved by 2.5% denaturing urea agarose gel. For ssRNA target, reaction was stopped by adding 2×RNA gel-loading buffer (NEB) with urea. Samples were boiled for 10 min at 95° C. and were resolved by 15% denaturing urea polyacrylamide gel electrophoresis. In all cases, gels were dyed with SYBR gold (ThermoFisher Scientific) and imaged with ChemiDoc XRS+System (Bio-Rad). Cleavage was quantified by ImageJ and fitted with single-exponential decay curve.

### ELISA Test

[0245] Elisa test was performed by using a modified protocol described elsewhere⁶⁰. Briefly, 1 μg/well of SpCas9, LFCA AnCas, LBCA AnCas and bovine serum albumin (BSA, Sigma Aldrich) were diluted in 1× bicarbonate buffer and coated onto 96-well plates (ThermoFisher Scientific) overnight at 4° C. Plates were washed with 1× wash buffer (TBST, ThermoFisher Scientific) and blocking with 1% BSA blocking solution for 1 hour at room temperature. Anti-Cas9 rabbit antibody (Rockland, 600-401-GK0) was diluted 1:25000 in 1% BSA blocking solution and plates were incubated for 2 hours at room temperature. Then, plates were washed and HRP-conjugated goat anti-Rabbit IgG (H+L) (Invitrogen), diluted 1:2000 in 1% BSA blocking solution, was added, and incubated for 1 hour at room temperature. Finally, 3,3′,5,5′-Tetramethylbenzidine ELISA substrate solution (ThermoFisher Scientific) was added and incubated for 10 min at room temperature. The reaction was stopped with 1 N sulfuric acid. The absorbance was measured at 450 nm by using a VICTOR X5 microplate reader (PerkinElmer).

### Human HEK293T Cells In Vivo Cleavage.

[0246] Functional validation of ancestral Cas nucleases was carried out in human HEK293T cells, as described elsewhere (Harms, D. W. et al. Human Genetics 83, 2014). Cells were grown in DMEM medium (Dulbecco's Modified Eagle Medium, Gibco), supplemented with sterile-filtered 10% fetal bovine serum (FBS), 10 mM HEPES pH 7.4, 2 mM L-glutamine and penicillin (100 IU/ml)-streptomycin (100 μg/ml) and handled under aseptic conditions using a sterile hood. HEK293T cells were cultured in incubators at 37ºC, 95% humidity and 5% CO₂. Humanized AnCas were cloned into pcDNA3.1 plasmid expression vector (ThermoFisher). The sgRNA target sequences were designed with Breaking-Cas web tool⁶² and cloned into MLM3636 plasmid vector (Addgene #43860) through Golden Gate cloning method. SpCas9 from hCas9 plasmid (Addgene #41815) was used as a positive control. For the in vivo genome-editing tests, cells were plated in 24-well plates at a density of 4×10⁵ cells/ml in a 0.5 ml volume of DMEM without antibiotics. To these cells, 1 μg of hCas/hAnCas plasmid and 0.5 μg of the corresponding sgRNA plasmid were transfected with 2 μl of Lipofectamine 2000 (Life Technologies) diluted in 100 μl of Opti-MEM (Gibco) per well. 72 hours post-transfection genomic DNA was isolated with High Pure Template Preparation Kit (Roche). INDEL occurrence was assessed by T7 Endonuclease I assay on PCR-amplified DNA fragments surrounding the target DSB.

Reconstructed Ancestral Sequences with Node Identification According to FIG. 1.

[0247] All are 1340 or 1368 amino acid residues (depending on the reconstruction method). Sequences are disclosed as set forth in SEQ ID NOs: 1 to 5 and 10 to 236.

[0248] SEQ ID NOs: 1 to 5 correspond to the ancestral Cas proteins exemplified above.

The application's sequence listing, which the Patent Office published only in electronic form, follows.

SEQUENCE LISTING (246 sequences)

SEQ ID NO: 1 - protein, 1340 aa, Artificial Sequence
  Last Firmicute Common Ancestor (LFCA Cas9) - Node 63
MKKDYSIGLDIGTNSVGWAVTDDNYNLVRKKMKVLGNTDKKSIGKALWGVRLFDAAETAEERRMHRTTRRRYTRRRQRIDLLQEIFQEEISKVDPSFFIRLNESRLHPEDKTDDRHPLFGDNETDKDYHKQYPTIYHLRKHLMESDEKHDIRLVYLALHHIIKYRGHFLIEGDLNSENTDVEELFKQLVQVFNDTFEEEHLSEEAIDIEEILTDKKSRSTRAKEVVKLFGSEKKQACISALIKLIVGLKGNLKKVFGDAEDTSIHFSKDNYEEDLEAIRDIIPDEYADLFEAIKALYDAIVLSGILGGSTSNTKAKVSASMIARYEQHQKDLKQLKQFVKEHLPEKYNEIFSDNTKNGYSAYIEGGTSQEDFYKYLKKILKELEEAEYLLEEIENENFLPKQRTSDNGVIPYQIHLEELRAILKNQGKYYPFLKENAEKIESILTFRIPYYVGPLARGNGRFAWMIRKKDGKITPWNFDEVVDKEKSAEEFIERMTNNCTYLPGENVLPKNSLLYEKFTVLNELNNVRLTTDKGKTRRFSAEQKQEIFDDLFRKNRKVTKKKLEDYLKREYEEFDSADISGIDGEFKSSLGSYHDFCKIVVKGNSLDEEDYKDIIEEIIKWLTVFEDRKMLRRRLEKYSEILTEEQIKKICKRHYTGWGRLSRKLLTGIRDKETGKSIIDVLRETDSSNRNFMQLLSDEDLSFKEEIEQANAEAEGENLHEIVEDLPGSPAIKRGILQALKIVDEIVKVMGHEPKNIFVEMARENQKTGRGRRSTKKRLKRLQEALKNLGSNLLKELPRDDNELRNDRLFLYYTQMGKCMYTGEPIDLDDLSNYDIDHIIPQSFIKDDSLDNRVLVSREENARKTDNFPSPEIRRKMKSFWQMLLKAGLISKKKFDRLTRADRGDFTDDELAGFIARQLVETRQITKHVATLLKQRYPTEKDEEDKTIRNAKIVSVKANLVSEFRQDFGLYKCREVNDYHHAHDAYLNAVVGNALLKKYPQLAAEFIKGDYRKNNAREENKANAKMHFYSNIMNSFTSDVKIADETGEIVWDKEKDIATVRKVMNYHQVLITRKVEEEKGGFFDQTILSKGNSKKLIPLKKNLDPEKYGGYNSPTVAYSVLVEYDIEKGKKKKLKTVKQLVGIPIRERAKLEKNPIKYLEKKGYQNPKVDLLIKIPKNSLFELDGGRRRILAAAKELKNANQLVLPAEEYTLLDKVAKIIKKNNSESIEYVEEHLSEFDELLESLIDYSPKLALQDKNLEKIKEAFEQLNLADKKEVAKEIINLLHCTATTANAALKFLGGSKNRMRYTSIKELLNASLIHQSITGLYETRIDLGKLGED

SEQ ID NO: 2 - protein, 1340 aa, Artificial Sequence
  Last Bacilli Common Ancestor (LBCA Cas9) - node 71
MKKDYSIGLDIGTNSVGWAVITDDYKVVRKKMKVLGNTDKKSIKKNLWGVRLFDSGETAEDTRLKRTTRRRYTRRRNRICYLQEIFQEEMNKVDDSFFHRLDESFLVPEDKKYDRHPIFGNLEEEVAYHEQYPTIYHLRKHLADSSEKADLRLVYLALAHIIKYRGHFLIEGDLNTENTDVEELFKQFVQVYNQTFEEQHLSDETIDVEEILTEKVSKSRRAENVLKLFPNEKKNGLFGQLIKLIVGLQGNFKKVFDLSEDAKLQFSKDTYEEDLENLLAMIGDEYADLFLAAKNLYDAILLSGILTTTDNNTKAKLSASMIKRYEEHQKDLAQLKQFIKEHLPDKYNEIFSDSSKNGYAGYIEGKTSQEDFYKYLKKILSKIDGAEYFLEKIEQENFLRKQRTFDNGVIPHQIHLEELRAILRRQGKYYPFLKENQEKIEQILTFRIPYYVGPLARGNSRFAWLTRKSDEPITPWNFDEVVDKEKSAEAFIERMTNYDTYLPNEKVLPKHSLLYEKFTVFNELTKVRYVTDRGKTQNFSAEQKQEIFDDLFKKNRKVTKKKLENYLKKEYEYFDSPDITGIEDEFNASLGTYHDLLKILKSKDFLDDEENEEILEDIVKILTVFEDRKMIRKRLEKYSDILTEEQLKKLERRHYTGWGRLSRKLINGIRDKQSGKTILDYLIDDDSSNRNFMQLINDDNLSFKEEIEKAQVIGETENLHEIVQDLPGSPAIKKGILQSLKIVDELVKVMGHEPKNIVVEMARENQTTSRGRRNSKQRLKRLEEALKNLGSNLLKEHPVDNQQLQNDRLYLYYLQNGKDMYTGQELDIDNLSNYDIDHIIPQSFIKDNSIDNRVLVSSEENRGKSDNVPSKEVVRKMKSFWQKLLNAGLISQRKFDNLTKAERGGLTEDDKAGFIKRQLVETRQITKHVANILDSRFNTEKDEEDNTIRNVKIITLKSNLVSQFRKDFGLYKVREINDYHHAHDAYLNAVVGTALLKKYPQLEPEFVYGDYRKNNAREENKATAKKHFYSNIMNFFASEVKIADETGEIVWDKEKDIATVRKVLSYHQVNIVKKVEVQKGGFSKETILPKGNSNKLIPRKNNWDPKKYGGFDSPTVAYSVLVTYDIEKGKKKKLKTVKELVGITIMERSAFEKNPIAYLEKKGYQNPQEDVLIKLPKYSLFELENGRRRMLASAKELQKGNQMVLPAHLVTLLYHAKRIDKSNNSESLEYVEEHRNEFDELLDYIIDFSEKYILADKNLEKIKKLYEQNNEADIKELAKSFINLLTFTAMGAPAAFKFFGETIDRKRYTSIKELLNATLIHQSITGLYETRIDLGKLGED

SEQ ID NO: 3 - protein, 1340 aa, Artificial Sequence
  Last Streotococci Common Ancestor (LSCA Cas9) - node 91
MKKPYSIGLDIGTNSVGWAVITDDYKVPAKKMKVLGNTDKQSIKKNLLGALLFDSGETAEATRLKRTARRRYTRRRNRICYLQEIFSEEMNKVDDSFFHRLDESFLVPEDKKYDRHPIFGNLAEEVAYHEQYPTIYHLRKHLADSTEKADLRLVYLALAHIIKFRGHFLIEGDLNAENTDVQKLFQQFVEVYNQTFEESHLSEETIDVEEILTEKISKSRRLENLIKHFPNEKKNGLFGNLIALILGLQPNFKTNFDLSEDAKLQFSKDTYEEDLENLLAQIGDEYADLFLAAKNLYDAILLSGILTVTDNSTKAPLSASMIKRYEEHQKDLAQLKQFIKEHLPDKYNEIFSDKSKNGYAGYIEGKTSQEDFYKYLKKILSKIDGAEYFLDKIDREDFLRKQRTFDNGSIPHQIHLQELHAILRRQGEYYPFLKENQEKIEKILTFRIPYYVGPLARGNSRFAWLTRKSDEKITPWNFDEVVDKESSAEAFIERMTNYDTYLPNEKVLPKHSLLYETFTVYNELTKVKYVTERGKTQFFSAEQKQEIFDHLFKKNRKVTKKKLKDYLEKEFEEFDSVDITGVEDEFNASLGTYHDLLKILKDKDFLDDEENEEILEDIVLTLTLFEDREMIRKRLEKYSDLFTKEQLKKLERRHYTGWGRLSRKLINGIRDKQSGKTILDYLIDDGSSNRNFMQLINDDSLSFKEEIEKAQVIGETDNLHEVVQDLAGSPAIKKGILQSLKIVDELVKVMGHNPENIVVEMARENQTTNRGRRNSRQRLKRLEEALKNLGSNILKEHPVDNQQLQNDRLYLYYLQNGKDMYTGEELDIDNLSQYDIDHIIPQSFIKDDSIDNRVLTSSEENRGKSDNVPSIEVVRKMKSFWQKLLNAGLISQRKFDNLTKAERGGLTEDDKAGFIKRQLVETRQITKHVAQILDSRFNTERDENDKRIRNVKIITLKSNLVSQFRKDFGLYKVREINDYHHAHDAYLNAVVGTALLKKYPKLEPEFVYGDYKKYNDRERGKATAKMFFYSNIMNFFKTEVKLADETGEIVWDKEKDFATVRKVLSYPQVNIVKKVEVQTGGFSKESILPKGNSDKLIPRKNNWDPKKYGGFDSPTVAYSVLVVADVEKGKAKKLKTVKELVGITIMERSAFEKNPIAFLEKKGYQNIQEDLIIKLPKYSLFELENGRRRLLASAKELQKGNEMVLPAHLVTLLYHAKRIDKSNNSENLEYVEKHKNEFDELLDYIIDFSEKYILADKNLEKIKELYDQNDDADINELASSFINLLTFTALGAPAAFKFFGETIDRKRYTSTKEVLNATLIHQSITGLYETRIDLSKLGED

SEQ ID NO: 4 - protein, 1340 aa, Artificial Sequence
  Last Pyogenic Common Ancestor (LPCA Cas9) - node 92
MKKPYSIGLDIGTNSVGWAVITDDYKVPAKKMKVLGNTDRQSIKKNLIGALLFDSGETAEATRLKRTARRRYTRRKNRICYLQEIFSEEMAKVDDSFFHRLEESFLVPEDKKYDRHPIFGNLADEVAYHENYPTIYHLRKKLADSTEKADLRLIYLALAHIIKFRGHFLIEGDLNAENTDVQKLFHQLVDTYNQLFEEDQLDTETIDAKAILTAKISKSRRLENLISQIPGQKKNGLFGNLIALSLGLTPNFKSNFDLSEDAKLQLSKDTYEEDLDNLLAQIGDQYADLFLAAKNLSDAILLSDILTVNDESTKAPLSASMIKRYEEHQQDLALLKQLVKEQLPEKYKEIFSDKSKNGYAGYIDGKTSQEEFYKYIKPILSKLDGAEEFLAKIDREDFLRKQRTFDNGSIPHQIHLEELHAILRRQEEYYPFLKDNQEKIEKILTFRIPYYVGPLARGNSRFAWLTRKSDEAITPWNFEEVVDKEASAQAFIERMTNFDTYLPNEKVLPKHSLLYETFTVYNELTKVKYVTEGMTKPFLSAEQKQAIVDLLFKKNRKVTVKQLKEDYFKKIECFDSVDITGVEDRFNASLGTYHDLLKIIKDKDFLDNEENEDILEDIVLTLTLFEDREMIEKRLAKYADLFDKKVLKKLKRRHYTGWGRLSRKLINGIRDKQSGKTILDFLKADGFANRNFMQLINDDSLSFKEEIEKAQVIGQTDSLHEVVADLAGSPAIKKGILQTIKIVDELVKVMGHNPENIVIEMARENQTTAQGIKNSRQRMKRLEEVLKKLGSNILKEHPVDNTQLQNDRLYLYYLQNGKDMYTGQELDIDNLSQYDIDHIIPQSFIKDDSIDNKVLTSSEENRGKSDNVPSIEVVRKMKSYWQKLLNAGLISQRKFDNLTKAERGGLTESDKAGFIKRQLVETRQITKHVAQILDSRFNTERDENDKPIRNVKIITLKSKLVSDFRKDFGLYKVREINDYHHAHDAYLNAVVGTALLKKYPKLEPEFVYGDYKKYDDKERGKATAKMFFYSNIMNFFKTEVKLANETGEIVWDKEKDFATVRKVLSYPQVNIVKKTEVQTGGFSKESILPKGNSDKLIPRKNNWDPKKYGGFDSPTVAYSVLVVAKVEKGKAKKLKTVKELVGITIMERSAFEKNPIAFLEAKGYQDIQEDLIIKLPKYSLFELENGRRRLLASAKELQKGNEMVLPAHLVTFLYHASRIDKSTSSENLEYVEQHKHEFDEILDYIIDFSERYILADKNLEKIKSLYNQNDDSDINELASSFINLFTFTALGAPAAFKFFDATIDRKRYTSTKEVLNATLIHQSITGLYETRIDLSQLGGD

SEQ ID NO: 5 - protein, 1340 aa, Artificial Sequence
  Last Pyogenic Common Ancestor (LPCA Cas9) - node 95
MDKKYSIGLDIGTNSVGWAVITDDYKVPSKKFKVLGNTDRHSIKKNLIGALLFDSGETAEATRLKRTARRRYTRRKNRICYLQEIFSNEMAKVDDSFFHRLEESFLVEEDKKHERHPIFGNIVDEVAYHEKYPTIYHLRKKLADSTDKADLRLIYLALAHMIKFRGHFLIEGDLNPDNSDVDKLFIQLVQTYNQLFEENPINASGVDAKAILSARLSKSRRLENLIAQLPGEKKNGLFGNLIALSLGLTPNFKSNFDLAEDAKLQLSKDTYDDDLDNLLAQIGDQYADLFLAAKNLSDAILLSDILRVNSEITKAPLSASMIKRYDEHHQDLTLLKALVRQQLPEKYKEIFFDQSKNGYAGYIDGGASQEEFYKFIKPILEKMDGTEELLAKLNREDLLRKQRTFDNGSIPHQIHLGELHAILRRQEDFYPFLKDNREKIEKILTFRIPYYVGPLARGNSRFAWMTRKSEETITPWNFEEVVDKGASAQSFIERMTNFDKNLPNEKVLPKHSLLYEYFTVYNELTKVKYVTEGMRKPFLSGEQKKAIVDLLFKTNRKVTVKQLKEDYFKKIECFDSVEISGVEDRFNASLGTYHDLLKIIKDKDFLDNEENEDILEDIVLTLTLFEDREMIEERLKTYAHLFDDKVMKQLKRRHYTGWGRLSRKLINGIRDKQSGKTILDFLKSDGFANRNFMQLIHDDSLTFKEEIQKAQVSGQGDSLHEQIANLAGSPAIKKGILQTVKVVDELVKVMGHKPENIVIEMARENQTTQKGQKNSRERMKRIEEGIKELGSQILKEHPVENTQLQNEKLYLYYLQNGRDMYVDQELDINRLSDYDVDHIVPQSFIKDDSIDNKVLTRSDKNRGKSDNVPSEEVVKKMKNYWRQLLNAKLITQRKFDNLTKAERGGLSELDKAGFIKRQLVETRQITKHVAQILDSRMNTKYDENDKLIREVKVITLKSKLVSDFRKDFQFYKVREINNYHHAHDAYLNAVVGTALIKKYPKLESEFVYGDYKVYDEQEIGKATAKRFFYSNIMNFFKTEITLANETGEIVWDKGRDFATVRKVLSMPQVNIVKKTEVQTGGFSKESILPKRNSDKLIARKKDWDPKKYGGFDSPTVAYSVLVVAKVEKGKAKKLKSVKELVGITIMERSSFEKNPIDFLEAKGYKDVQKDLIIKLPKYSLFELENGRRRMLASAGELQKGNEMVLPAKLVTFLYHASHIEKSKSPENNAYVEQHKHDLDEILEYISEFSKRYILADKNLSKVKSLFNKHEDSSISELASSIINLFTLTSLGAPAAFKFLDTTIDRKRYTSTKEVLDATLIHQSITGLYETRIDLSQLGGD

SEQ ID NO: 6 - DNA, 19 bp, Artificial Sequence
  PAM library construction forward primer
aataggcgtatcacgaggc

SEQ ID NO: 7 - DNA, 18 bp, Artificial Sequence
  PAM library construction reverse primer
agcgagtcagtgagcgag

SEQ ID NO: 8 - DNA, 21 bp, Artificial Sequence
  HEK293T cell genome editing foward primer
tattgttcctccgtgcgtcag

SEQ ID NO: 9 - DNA, 19 bp, Artificial Sequence
  HEK293T cell genome editing reverse primer
gacgagaaacacagcccca

SEQ ID NO: 10 - protein, 1340 aa, Artificial Sequence
  1340 residue - marginal ancestral sequence reconstruction method node 60
MKKDYSIGLDIGTNSVGWAVTDDNYNLVRKKMKVLGNTDKKSIGKALWGARLFDAAETAEERRMHRTTRRRYTRRRWRIDLLQEIFQEEISKVDSSFFIRLKESRLHPEDKTDDRHPLFGDNETEKDYHKQYPTIYHLRKHLMESDEKHDIRLVYLALHHIIKYRGHFLIEGDLSSENTDVEELFKQLVQVLNDTLEEEHLSEEANDIEEILTDKKSRSTRAKEVVKLFGSEKKEACISALVKLIVGLKGNLKKVFGDAEDTAIHFSKDNYEEDVEAIRDLIPDDYADLFEAIKALYDAIVLSGILGGSTSNTKAKVSASMVARYEQHQKDLKLLKQFVKEHLSEKYNEIFSDNTNNGYSAYIEGGTSQEDFYKYLKKLLKELEDAEYLLEEIENENFLPKQRTSDNGVIPYQLHLEELRAILKNQGKYYPFLLENAEKIESILTFRIPYYVGPLARGNGRFAWMIRKKDGVITPWNFDEVVDKEKSAEEFIERMTGNCTYLPGETVLPKNSLLYEKFTVLNELNNVRLTIDKGKRRRFSAEQKQEIFDDLFRKNRKVTKKKVEDYLKREYENFDSADISGIDGEFKSSLGSYHDFCKIVVKANSLDEEDYKDIIEEIIKWLTVFEDRKMLRRRLEKYGEILTEEQIKKICKRHYTGWGRLSRKLLTGIRDKETGKSIIDVLRETDPSNRNFMQLLSDEDLGFKEEIEQANAEAAGENLQEIVDDLPGSPAIKRGINQALRIVDEIVKVMGKEPSNIFVEMARENQQSARGRRSTKKRLKRLQEALKNLGSDLLKELLRDDNELRNDRLFLYYTQMGKCMYTGEPIDLDDLSKYDIDHIIPQSFIKDDSLDNRVLVSREENARKTDNLPSPEIRRKMKSFWQMLLKAGLISKKKFDRLTRADRGDFTDDELAGFIARQLVETRQITKHVATLLKQRYPTEKDEEDKTIRNAKIVSVKANLVSEFRQDFGLYKCREVNDYHHAHDAYLNAVVGNALLKRYPSLAAEFIKGDYRKNNAREENKANAKMHFYSSIMNSFTSDEKIADETGEIVWDKEKDIATVRKVMNYRQVLITRKVEEETGGFFDQTIYSKGNSKKLIPLKKNLDPDKYGGYSSPKVAYSVLVEYDIEKGKKKKLKTVKQLVGIPIRERAKLEKNPSKYLEKKGYENPKVDLLIKIPKNQLLELDGGRRRILAAAKELKNANQLVLPAEEYTLLDKVAKIAKKNNSESIEYVEEHLSEFDELLESLIDYSPKLALQDNNLEKLKEAFEQLNLADKKDVAKEIIGLLHCTATTANAALKSLGGSKNRMRYTSTKSLLNASLIHQSITGLFETRIDLGKLGED

SEQ ID NO: 11 - protein, 1340 aa, Artificial Sequence
  1340 residue - marginal ancestral sequence reconstruction method node 61
MKKDYSIGLDIGTNSVGWAVTDDNYNLVRKKMKVLGNTDKKSIGKALLGARLFDAAETAEERRMHRTTRRRYTRRRWRLDLLQEIFQEEISKVDSSFFIRLKESRLHPEDKTDDRHPLFDDNETEKDYYKQYPTIYHLRKHLMENDEKHDIRLVYLALHHIIKYRGHFLIEGDLSSENTDVEELFKQLVQVLNDALEEEHLSEEANDIEEILTDKKSRSTRAKEVVKLFGSEKKEACISALVKAIVGLKGDLKKVFGDAEDTAIHFSKDDYEEDVEAIRDLIPDDSADLFEAIKALYDAIVLQGLLGDSTSNTKAKVSASMVARYEQHQKDLKLLKQFVKEHLSEKYNEFFSDNTNNGYSAYIEGGTSQEDFYKYLKKLLKELEDAEYLLEEIENENFLPKQRTSDNGVIPYQLHLEELRAILKNQGKYYPFLLEDAEKIESLLTFRIPYYVGPLARGNGRFAWMIRKKDGVITPWNFDEVVDKEKSAEEFIERMTGNCTYLPGETVLPKNSLLYEEFTVLNELNNVRLTIDKGKRRRFSAEQKQEILDDLFRKNRKVTKKKVEDYLKREYENFDSADISGIDGEFKSSLGSYHDFCKIVVKADSLDEEDHKDIIEEIIKWLTVFEDRKMLKRRLEKYGEILTEEQIKKICKRHYTGWGRLSRKLLTGIRDAETGKSIIDVLRETDPSNRNFMQLLSDEDLGFKEEIDQLNAEAAGENLQDIVDDLPGSPAIKRGINQAIRIVDEIVKVMGKEPSNIFVEMAREEQQSARGRRSTKRRLKRLQEALKNLGSDLLKELLRDDNDLRDDRLFLYYTQMGKCMYTGEPIDLDDLSKYDIDHIIPQSFIKDDSLDNRVLVSREENARKTDNLPSPEIRRKMKSFWQMLLNARLISKKKFDRLTRADRGDFTDDELAGFIARQLVETRQITKHVATLLEQRYPTEKDEEDKTIRNAKIVSVKANLVSEFRQDFGLYKCREVNDYHHAHDAYLNAVVGNAILKRYPSLAADYIRGDYRKNNAREENKANAKAHFYSSIMNSFTSDEKIADETGEIVWDKEKDIATVRKVMNYRQVLITRKVEEETGAFFDQTIYSKGSSKKLIPLKKNLDPDKYGGYSSEKVAYSVLVEYDIEKRKAKKLKTVKQLVGIPIRERAKLEKNPSKYLEKKGYENPKVDLLIRIPKNQLLELDGGRRRILAAAKELKNATQLVLPAEEYTLLDKVAKIAKKNNSESIEYVEEHLSEFDELLESLIDYSPKLALQDNNLEKLKEAFEQLNLADKKDVAKEIIGLLHCTATTANAALKSLGGSKNRMRYTSTKSLLNASLIHQSITGLFETRIDLGKLGED

SEQ ID NO: 12 - protein, 1340 aa, Artificial Sequence
  1340 residue - marginal ancestral sequence reconstruction method node 62
TTDDYSIGLDMGTNSVGWAVTDSNGSMAHKKMPTLGNTDKKSIGKPTLGSRLFDAAETAAEARAHRGQRRRYVRRRWRLDLLQGLFQDEINKVDSEFFIRLRQSRLHVEDRADYRWPLFNDSDTEKDYYKRFPTIYHLRKWLMETDEKADIRLIYLAVHNIVKHRGNFLREKNLSSHNADPAEAVRHLRQALNDWLERGYLAENDSHILDILTDSERRSDQAKEIAKLFGTEQSDACNSALAKAIVGLKAELKNVFGEAEKTAIHLSSDDYEDDVEAIRDAIPDDSGELFQALCALYSAYVLQGLLSYAPGQTKAKISANMVAKYDQYGKDLKLLKNLARTYVSENYDAFFRGETYEGSSDYVQGYASYDDFQKSVKKLFKQLEDDRYMMKRFGEEKFLRRLKTSDNGSIYYQLHLEELRAILKNQGKHYPFLLEEEDKIESLVSFRIPYYVGPLSRENQRFAWSSRMKDAVITPWNWDEIIDRDKSAEEFILRMTGDCTYLQGEPVLPKCSLLYEEFCVLNELNGARWTIDEDDERRFDAAQREGILHDLFRKTRKVTYKKVADWLEREYENFANAHVRGGQGEFESKLGSYIFFCKDVFKTDSLDEADYKPMIEQIILWNTLFEDRDILKRKIEAYGEHLTDEQIKVICKKRFTGWGRLSRKLLTGIKDADTGRSIIDVLREGNPNSRTFMEVLRDEDLGFQKKIDDFNKDYAGENLMDIVNDLPGSPAIRRSINQAIRIVDEIVSIAGKEPSNIFIEVTREEDDPRKKGRRTKRRYEDIKNALENFKTDLWKELLGKDSNNLDERLSLYFMQRGKCMYSGRPIKLEELHKYEVDHIIPRSYIKDDSLENKVLVCREENQRKTDELLDPAIRRKMGDYWRMLHKAKLIGDKKFNNLFRRDRGDIDDKTLKGFVARQLVETSQMVKLVQTLLEARYPTEKDEEDKTIKNAKIVPVKANISHDLREAAGLVKCREANDFHHAHDAYLACRVGLFIQKRHPSVYANHVMRDYARKQAREYNKTHSMAHTKGFIVNSFMSSEFDKDETGEIFWDAEAEVEDIRRVLNYRQCFISRMPVEDTGAFWDQTIYSPRSNKKLLPLKRDLDPDKYGSYSREQFAYSVFFIYDIEARDAKKSKTVLQFAQVPVRVTAAIAKDPSKYASKLGQENLEFTRIIRILKKQLLELENGDRLIITGAKEVRNATEFAFSLEETTLVERCSQIAKEGNPEDIEYVEQLSSQLNELFSSLIERGPKLGVRLHAQLKLDQYLSQFDDAALRDKAKVIIGLISITNGATNTALSSLGGSKNRMRYTHNKLLNNASLIDQSVTGMFERRTHIGLLGED

SEQ ID NO: 13 - protein, 1340 aa, Artificial Sequence
  1340 residue - marginal ancestral sequence reconstruction method node 64
MKKEYYIGLDMGTNSVGWAVTDENYNLCKRHMKVLGNTDGKSKGKAMWGVRLFDTAETAEERRMYRTSRRRLQRRKQRIELLQEIFSEEISKVDPTFFIRLNESRLHPEDKTEDRYPLFVDNETDKDYHKQYPTIYHLRKELMENDEPHDIRLVYLALHHIIKHRGHFLIEGDLDSENTDLGEVFKELVKVFNDELEIELLSEEALQIEEILTDKKSKSAKAKEIAKLFGSEKKQACIKALVKLIVGLTGNLSEIFGDSEETSINFSESNYEENMEAIEEILPDEFSELIEAIKALYDWAVLVDILGGSTYISEAKVKASMIARYEKHRKDLQQLKNLVKTHCPEEYKEIFSSDKKNGYSAYIKNGCSQEDFYKYLKKILEELEKAEYLLEEIENETFLPKQRSKDNGVIPYQVHLQELKKILKNAGEYLPFLKENAEKIESIFKFRIPYYVGPLSRGNGSNAWMVRKEDGKIYPWNFDDVVDVEKSAEEFIERMTNKCTYLPGEDVLPKNSLLYSKFMVLNELNNLRIDGEKIKKRRFSVELKQEIYNDLFCRNRKVTGKKIKDYLKREYNEIDEAEISGIDGDFKSSLRSYHDFKKIVGKGNSLDEEDYKEIIEEIIKWITIFDDKKMLKRRLKKYPEILSEEQIKKICKLKYTGWGRLSREFLTGVRDKETGESIINALWETDSSNDNLMQLLSNKDYSFKEEIEQINAEAAGENSYETVEDLYVSPAVKRAIWQTLQIVEEIVKVMGHEPKRIFVEMAREKEKNGKGRTSRKKRLKELYKSCKNDASDLLKELGRDDNELRSDKLFLYYTQMGKCMYSGEPIDLDDLFKYDIDHIYPQSKIKDDSLDNRVLVRKEVNAKKSDNFPSPEIREKMKPFWQMLLKKGFISKKKYDRLTRTTRGEFTDDELAGFIARQLVETRQSTKAVAELLKQLYPTEKDEEDKTIRDSEIVYVKANLVSEFRQDFDLIKCREVNDYHHAKDAYLNIVVGNVYHVKYTNNAAKFIKGNRGRNYAREENKANAKMHFYSNIKKMFTSDVKSADKNGEIVWDKDKSIATVRKIMNKNNILYTRYTYEEKGGLFNQTILKKGNSQKLIPLKKNLDPEKYGGYNSPTAAYFALVEYDIEEGKKRKRKTTKQLVAIPIYEKAKLEENPIKYLEERGLKNPAVDLLIKIKKNSLFEMDGFRMRLSGATIVFKNAVQLVLDEEHYEILKKVAKVLEKNENQTIGYTEELLSLYDELLEKLKDYKNRLANQAKTLEKGKEKFEKLNLEDKAEVINEIINLFHCNATTANNALKLIGGSKNRMKNNNISKSNKVSLINQSITGLYETKIDLGKLGED

SEQ ID NO: 14 - protein, 1340 aa, Artificial Sequence
  1340 residue - marginal ancestral sequence reconstruction method - node 65
MKKEYYLGLDIGTNSVGWAVTDENYNLVKRHVKVLGNTDGKSKGKAMWGIRLFETAETAEERRMYRSSRRRLQRRKQRIDLLQEIFSEEIAKVDLTFFIRLNESRLHPEDKTEEKYPLFVDKETDKDYHKQYPTIYHLRKELIENPEPHDIRLVYLALHHIIKHRGHFLIEGDSDNKNTDLSEVFSELVKAFNDVIEYEILSTEALELEEILTDKTSKSAKAKEIAKLFEDEKEQQCIKALSKLIVGLTGNISEMFHQSEETSINFSESNYEENMEAIEEIIPDEFSELIDAIKALYDWAVLVEILGGSTYISEAKVKASMIARYEKHRKNLKQLKNLVKTYCSEEYKEFFSSDEKNGYSAYIKNGCSEEDFYKYLKKILEEKEKAEYLLAEIENETLLPLQRSKDNGTIPHQVHLQELKKILENASEYLPFLKENAEKIISIFKFRIPYYVGPLSRRNGSNAWMIRKEDGRIYPWNFDDVVDVEKSNEEFIERMTNKCTYLPGEDVLPKNSLLYSKFMVLNELNNLKIRGNKIKKRRFSVELKQEIYNDLFCRNRKVTGKKILDYLKREYNEIDQADISGIDGDFKSALASYHDFKKLVGNGNSLDKEDYKEIIEEIIKWKTIYDDNKMLRRMIKKYPEVLSEEQIKKICKLKYTGWGNFSREFLTGVRGKETGESIINALWETDSSNDNLMQLLSNKDYSFKEEIDQINAEAAGENSYETVEDLYVSPANKRAIWQTLQIVEEIVKVMGHEPKRIFVEMARGKEKNAKRTTSRKKRLKELYKSCKNDTRNLMKELGRDDNELRSKKLFLYYTQMGKCMYSGEEIDLDDLLNWDIDHIYPQSKIKDDSLDNMVLVRKEVNAKKSNELLSPEIREKMKPYWKMLLQKGFISKKKYDRLTRTTRGEFTDEELSGFIARQLVETRQSTKAVAELLKQLYPTEKDEEDKTIRDSEVVYVKANLVSEFRQDFDLLKCREVNDYHHAKDAYLNIVVGNVYHVRYTNNPAKWIKGNRDSNYAREENKANAKKHFYSSIKKMFSYDVKNADKNGEIVWNKDSSIDQIRKIMNKNNILYTEYTYCEKGQLFNETLLKKGNSEKLIPLKKNLDPEKYGGYTTPKASYFALVEFDIEEGKKRKRKTHKQLIPVPVYEKAKLEHNAVKYLEERGLSNVVVDLKYKIKKNSLLKMDGYRMRLRGANIIFKNAVQLVLDEEHYEILRKVEKYLEKNENQTIGFTEELLSLYEELLEKLKDYKNRPANQMKTLEKGKEAFESINLEDKAEVINEIIKLFRCNATTASNALKLINGSQNRMKNKNILNSNKVKLINQSITGLYETKIDLVKLGED

SEQ ID NO: 15 - protein, 1340 aa, Artificial Sequence
  1340 residue - marginal ancestral sequence reconstruction method - node 66
MKKDYYIGLDMGTNSVGWAVTDENYNLCKRHMKVLGNTDGKSKGKAMWGVRLFETAETAEERRMFRTARRRLQRRKQRIELLQEIFSEEISKVDIAFFLRLNESKLYPEDKTELPYALFVDKETDKDYHKQYPTIYHLRKELMQNDEPHDIRLVYLALHHIIKHRGHFLFEGDLDSEVTDFGAVFKELLKVINDELEIALLSEEALQIEEILKDKKSKSAKSKEIVKLLGSEKKQACIKALVKLIVGLTVKLSEIFGDGEKSSISFAESNYEENVETVEETLPERFSELIEAIKALYDWAVLVDILGGSTYISEAKVKTSMIARYEKHRKDLQQLKALVKTHCPEEYKEIFSSDKLNNYSAYIKNGCSQEDFYKYLKKTLEELEKAEYLLEEIENETFLPKQVSKDNGVIPYQVHLSELKKILKNAGEYLPFLKENAEKIEQIFEFRIPYYVGPLNRGNGENAWMVRKEDGKIYPWNFDNVVDVEKSAEEFIERMTNKCTYLPGEDVLPKNSLLYSKFMVLNELNNLRIDGEKIKKRRFSVELKQAIYNDLFCRRRKVTGKKLKDYLKREGGTGKEAEISGIDGDFKSSLRAYHDFKKIVGKGNSLDEEDNQNIKEEIIKSITIFDDKKMLKKRLKKYPEILSEEQIKKICKLKYTGWGRLSREFLTEVRDKETGENIINALWETDSSNDNLMQLLSNKDYSFQEEIEQINAEAAGESSYETVEDLYVSPAVKRAIWQTLQIVEEIVKVMGHEPKRVFVEMAREKGKNGKGRTSRKKRLKELYKSCKNDAPDLWKELGRDDNELRSDKLFLYYTQMGRCMYSGEPIDLEDLFKYDIDHIYPQSKVKDDSLDNRVLVKKEVNSKKSDNYPSPEIREKMKPFWQMLLKKGFISKKKYDRLTRTTRGEFTDDELAGFIARQLVETRQSTKAVAELLKQLYPTEKDEEDKTIRDTEIVYVKANLVSEFRQDFDFIKCREVNDYHHAKDAYLNIVVGNVYHVKYTKNAAKFIKGNPGRNYAREENKANAKMHFYSNLKKMFTSDVPSADRNGEIVWDKDGSIATVRKIMNKNNILYTRYSYEEKGGLFDQQILKKGNGQALIPLKKRLDIEKYGGYNKPTAAYFALVEYDIEEGKKGKKKTTKQLVAIPIYEKAKLEENPIKYLEERGLKNPAVDLLIKIKKNSLFEVDGFRMHLSGRTIVFKSAVQLVLDEENEAILKKVAKVLEKHKNQKIGYTEELLSLYDALLEKLKDYKIRLATQAKTLENGKEKFEKLSLEDKCQVINEILHLFQCNATTANNALSLIGGAKNIMTNNNISKCNKVSLINQSITGLYETKIDLKKIGED

SEQ ID NO: 16 - protein, 1340 aa, Artificial Sequence
  1340 residue - marginal ancestral sequence reconstruction method - node 67
MKKEYYVGLDMGTGSVGWAVTDENYNICRRHMKVLGNTDGKSKGKAMWGVRLFETANTAEERRMFRTARRRLQRRKQRIELLQEIFAEEISKVDIGFFLRMKESKYYPEDKPELPYALFVDDETDKDYHKQYPTIYHLRKMLMQNEEPHDIRLVYLALHHIIKHRGHFLFEGDISSEVTDFGAAFSEFLKVINDELEISLLDEEALQIEEILKDKKSKSAKKTELVKLLAAEKKQKCEKALLKLISGCTVKLSDIFGDGERSKISFADSNYEEYIATVEETLAERFLELIEAAKALYDWAVLVDILGGSTYISEAKVKTSMIARYEKHRRDLKQLKALVKTHLPEEYKDIFSSDKLNNYSAYIKNGCSKEDFYSFLKKNLKELEEAEYLLEEIENETFLPKQVSKDNGVIPYQVHLSELKKILKNAGEYLPFLKENAEKIEQIFKFRIPYYVGPLNKGNGENAWAVRKQDGKIYPWNFENVIDVEESAEKFIRRMTNKCTYLPGEDVLPKDSLLYSKFMVLNELNNLRIDGEKIKKRRFSVELKQAVYEDVFCRYRKVTGKKLKDYLIREGITGKEAEISGIDGDFKSSLRAYHDFKQIVGKGKLLDVELTQNEKEDIIKNITIFDDKKMLKKRLKKYPEILSEKQIKKICALKYTGWGRLSREFLEEVQAKETGENIISALWETDSSNDNLMQLLSNKDYGFQEEIEQLNAEAAGKTSYETVEDLYVSPAVKRPIWQTLQIVEEIEKVMGSKPKRVFVEMAREKGENGRGRTSRKKRLKELYKSCKKEAPDLWKELGHDDHKLRSDKLFLYYTQMGRCMYSGEPIDLEDLFKYDIDHIYPQSKVMDDSLDNRVLVKRELNAKKTDNYPSAEIREKMKPFWDMLLKKGFISKEKYDRLTRSTRGEFTENELAGFIARQLVETRQSTKAVAELLKQAYPTEKDEEDKTIKETEIVYVKANTVSEFRQDFDFIKVRDVNDYHHAKDAYLNIVVGNTYYVKFTKNAAWFIKGNPGRTYAREENKANAKLHFYSNLKKMFTSDVASADRNGEIAWGKDGTIVTVRKVMNKNNILFTRRSYEVKGGLFDQQIMKKGKGQALIPVKERLSIEKYGGYNKATGAYFMLVESDIEEGKKGKKKTTKELVAIPLYEKAKLEDNAIRYLEERGLKNPKVDLLIKIKKDSLFEVDGFRMHLSGRTLIFKCANQLVLDEENEKILKKVAKVLERHKNIKIGYTEEMLIKYEAFLDKLKNYNIRLSTQAKTLENGKEKFEKLSLEDKCQVINEILHLFQCQSVAANNALSMIGGAANILVNNNISKCNKVSIINQSITGLYEQEIDLKKIGED

SEQ ID NO: 17 - protein, 1340 aa, Artificial Sequence
  1340 residue - marginal ancestral sequence reconstruction method - node 68
MKKEYYVGLDMGTGSVGWAVTDESYHICRRHMKVLGNTDGKAHGKALWGVRLFETANTAEERRMFRTSRRRLDRRKRRIELLQEIFAEEISKVDPGFFLRMKESKYYPEDKPELPYALFVDKETDKDYHKQYPTIYHLRKMLMQDEEPPDIRLVYLALHHMIKHRGHFLFAGDISDEVTDFGAAFSEFLKIIKDELDISLLDEEALQIEEILKDKLTRSAKKTELVKGLKAEKKNGCEKALLKLISGCTVKLSDIFGDGERPKISFADSSYEDYAAVVEDELGERFIEIIEAAKALYDWAVLVDILGGSTSVSEAKVRTSMIARYEKHRRDLKYLKALVKTYLPEEYKDIFSSDKLNNYSAYIKNGCSKEDFYDFLKKNIKELEEAEYLLEELEKETFLPKQVSKDNGVIPYQVHLYELKKILKNAGEYLPFLKENAEKIEQIFEFRIPYYVGPLNKGNGEFAWAVRKSNEKIYPWNFENVIDVEASAEKFIRRMTNKCTYLPGEDVLPKDSLLYSKFMVLNELNNLRIDGEKIKKRRFSVELKQEIYEDVFCRYRKVTAKKLKDYLIREGITGKDAEISGIDGDFKGSLRAYHDFKEILGKGKLLDVELTQNEKEDIILNITLFDDKKLLKKRLKKYPQILTEKQIKKICALNYTGWGRLSREFLEEVQAPETGENIITALWETDPSNDNLMQLLSNEDYGFQEEIEQLNAEKAGKTSYETVEDLYVSPAVKRQIWQTLQIVKEIEKVMGEKPKRVFVEMAREKQENKRGRTSRKKRLKDLYKSCKNEEPDWWKELGHEEHKLRSDKLFLYYTQKGRCMYSGEPIDLEDLWKYDIDHIYPQSKVMDDSLNNRVLVKREYNAKKTDNYPSAEIRQKMKPFWKSLLTGGFISKEKYDRLIRSTRGEFTANELAGFIERQLVETRQSTKAVAEILKQVFPTEKDEEDKTIKETEIVYVKAKTVSEFRQDFDFIKVRDVNDFHHAKDAYLNIVVGNTYYVKFTKNAAWFIKENPGRTYAREEKKANAKLHFYSNLKKMFTSDVAVADRNGEIAWGKSGTIVTVRKMMNKNNILFTRRSYEVKGGLFDQQIMKKGKGQVYIPVKERLSIEKYGGYNKATGAYFMLVESDIEEGKKGKKKRTIEFVPIPLYEKAKLEANEARFLEERGLKEPKVDILIKIKKDTLFEVDGFKMHLSGRTLIFKCANQLILDEENEKILKKVAKVIERQKNVKIGYTEELLMKYETFLDKLKNYGIRLSTQAKTLENGKEKFEKLSLEDKCQVLSEILHLFQCQSSAANNALSMIGGPGNILVNNNISKCNKISIINQSPTGIYEQEIDLKKIGED

SEQ ID NO: 18 - protein, 1340 aa, Artificial Sequence
  1340 residue - marginal ancestral sequence reconstruction method - node 69
MEKEYYVGLDMGTGSVGWAVTDESYHILRRHMKILGNTEGKAHGKAMWGVRLFESAKTAEERRMFRTSRRRLDRRNWRIEILQEIFAEEISKVDPGFFLRMKESKYYPEDKPELPYALFVDKDTDKDYHKKYPTIYHLRKMLMETEETPDIRLVYLALHHMMKHRGHFLLSGDISEEVTEFGTTFSQFLENIKNELDFNLLDEEALQIEEILKDKLTRSAKKTKLVKGLKAEKKNVCEKALLTLLSGGTVKLSDIFGMGERPKISFADNGYEDYAAVVENELGEQFYEIIEAAKAVYDWAVLVDILGGSTSVSEAKVRTSMIKRYEKHKSDLKYLKAIVKKYLPEEYKDIFSSDKLNNYSAYIKNGCSKEEFYDFLKKNIKELEAQEYLQEELEKETFLPKQVNKDNGVIPYQVHLYELKKILDNLGDKIPFLKENAEKIEQLFEFRIPYYVGPLNKGNGEFAWAVRKSNEKIYPWNFENVIDVEASAEKFIRRMTNKCTYLIGEDVLPKDSLLYSKFMVLNELNNLRLDGEKIKKRKFSVELKQKIYRDVFCRYRKVTAKKLKNYLIREGITGKNVEITGIDGDFKGSLTAYHDFKEILGKGKLLDVELTQNEKEEIILNITLFDDKKLLKKRLKKYPQILTEKQIKKICALSYTGWGRLSKKFLEEVTAPETGENIITALWETDPSNDNLMQLLSNEDYRFMEEIEQFNAEKADKTSYETVEDLYVSPAVKRQIWQTLQIVKEIEKVMGEKPKRVFVEMAREKQENKRGRESRKKKLSDLYKSCKNEEPDWVKELGHEEHKLRSDKLYLYYTQKGRCMYSGEPIDLEDLWKYDIDHIYPQSKTMDDSLNNRVLVKKEYNAKKSDTYPSADIRQKMKPFWKSLLTGGFISKEKYDRLIRNNRGELSANELAGFIERQIVETRQSTKAVAEILKQVFPTEKDEEDKTIKETEIVYVKAKTVSKFRQDFDFIKVRDVNDLHHAKDAYLNIVVGNTYYVKFTKNAAWFIKENPGRTYAREEKKANAKLHFYSNLKKMFTSDVAIEDRNGEIAWGKSGTIVTVRKMMNKNNILVTRRSYEVKGGLFDQQIMKKGKGQVYVPVKERLSIEKYGGYNKAAGAYFMLVESDIEEGKKGKEKRTIEFVPIPLYDKAKLESDEARFLEERGLKEPKVDILIKKIKDTLFEVDGFKMWLSGRTLIFKCANQLILDEENMKTLKKVVKFIQRQKNVKIGITEEVLMKYETFLDKLKNYGIRLSSQAKTLVNGKEKFEKLSLEDKCQVLYEILHLFQCQSSAANNALKMIGGPGNILVNNNISKCNKISIINQSPTGIYEKEIDLLKIGED

SEQ ID NO: 19 - protein, 1340 aa, Artificial Sequence
  1340 residue - marginal ancestral sequence reconstruction method - node 71
MKKDYTIGLDIGTNSVGWAVITDDYKVVRKKMKVLGNTEKKSIKKNFWGVRLFDSGETAEDTRLKRTTRRRYTRRRNRICYLQEIFQEEMNKVDDNFFHRLDESFLVPEDKKYDRHPIFGTLEEEVAYHEQYPTIYHLRKHLADSSEKADLRLVYLALAHIIKYRGHFLIEGELNTENTSVEELFKQFVQVYNQTFSEQELVDETIDVEEILTEKVSRSRRAENVLKLFPNEKSNGLFGQFIKLIVGNQGNFKKVFDLEEDAKLQFSKDTYEEDLENLLAMIGDEYADVFLAAKNLYDAILLSGILTTTDKNTKAKLSASMIERYEEHQKDLAQLKQFIKEHLPDKYNEIFSDSSKNGYAGYIDGKTSQEDFYKYLKKILEKIDGAEYFLEKIEQENFLRKQRTFDNGVIPHQIHLEELRAILRRQGKYYPFLKENQEKIEQILTFRIPYYVGPLAKGNSRFAWLTRKSDEPIRPWNFDEVVDKEKSATAFIERMTNYDTYLPNEKVLPKHSLLYEKFTVFNELTKVRYVDDRGKTQNFSAEEKQEIFDDLFKKNRKVTKKKLENYLKNEYNYIDSPTIKGIEDEFNASFGTYHDLLKIGVSREFLDDEENEEILEDIVKILTVFEDRKMIRKQLEKYSDILSEETLKKLERRHYTGWGRLSRKLINGIRDKQSGKTILDYLIDDDSSNRNFMQLINDDNLSFKEEIEKAQAINETENLQEIVQDLPGSPAIKKGILQSLKIVDELVEIMGYQPKNIVVEMARENQTTSRGKRNSKPRLKRLEEALKELGSNLLKEHPVDNQQLQNDRLYLYYLQNGKDMYTGQELDIDNLSNYDIDHIIPQSFITDNSIDNRVLVSSKENRGKSDNVPSKEVVRKMKSFWQKLLKAGLISQRKFDNLTKAERGGLTEDDKAGFIKRQLVETRQITKHVANILDSRFNTEKDEEDNTIRNVKIITLKSALVSQFRKTFGLYKVREINDYHHAHDAYLNAVVATTLLKVYPQLEPEFVYGEYRKNNAHEENKATAKKQFYSNIMKFFASEEPIIDENGEILWDKEKDIATVKKVLSYHQVNIVKKVEIQKGGFSKETIQPKGNSNKLIPRKNNWDPKKYGGFDSPTVAYSVLITYDIEKGKKKKLKRVKEIVGITIMERSAFEKNPIAYLEKKGYQNPKEDVLMKLPKYSLFELENGRRRMLASAKELQKGNQMVLPSHLVTLLYHAKRIIESNNSESLEYVEEHRQEFDELLDYIIDFSEKYILADKNLEKIKKLYEQNNEADIKELAKSFINLLTFTAMGAPADFKFFGETIPRKRYTSIKELLNATLIHQSITGLYETRIRLGELGED

SEQ ID NO: 20 - protein, 1340 aa, Artificial Sequence
  1340 residue - marginal ancestral sequence reconstruction method - node 72
MKKDYTIGLDIGTNSVGWAVITDDYDLVRKKMKVLGNTEKKSIKKNFWGVRLFDEGETAEDTRLKRTTRRRYTRRRNRISYLQEIFQEEMNKVDENFFHRLDESFLVPEDKKYDRHPIFGTLEEEVAYHEQYPTIYHLRKHLADSSEKADLRLVYLALAHIIKYRGHFLIEGELNTENTSVEETFKQFLQVYNQTFSEQELVDETIDVEEILTEKVSRSKKAENVLKLFPNEKSNGLFGQFLKLIVGNQGNFKKVFDLEEDAKLQFSKETYEEDLETLLAMIGDEYADVFLAAKNVYDAIELSGILSTTDKNTKAKLSASMIERYEEHKKDLAQLKQFIKEHLPDKYYEIFKDSSKNGYAGYIDGKTSQEDFYKYIKKILEKIDGAEYFLEKIEQENFLRKQRTFDNGVIPHQIHLEELRAILDRQGKYYPFLKENQEKIEQILTFRIPYYVGPLAKGNSRFAWLTRKSDEPIRPWNFDEVVDLEKSATRFIERMTNYDTYLPNEKVLPKHSLLYQKFTVFNELTKVRYIDDRGKTQNFSSEEKQEIFDDLFKQNRKVTKKDLENYLKNEYQYIDSPTIKGIEDSFNASFSTYHDLLKIGVSREFLDDEENEEILEDIVKILTVFEDRKMIRKQLEKYSDVLSEETLKKLERRHYTGWGRLSKKLINGIRDKQSNKTILDYLIDDDGSNRNFMQLINDDNLSFKEEIEKAQSINETENLQEIVQDLPGSPAIKKGILQSLKIVDELVEIMGYQPKNIVVEMARENQTTSRGKRNSKPRLKRLEEALKELGSNLLKEHPTDNQQLQNDRLYLYYLQNGKDMYTGQELDIDNLSNYDIDHIIPQSFITDNSIDNRVLVSSKENRGKSDNVPSKEVVRKMKPFWQKLLKAGLISQRKFDNLTKAERGGLTEDDKAGFINRQLVETRQITKHVANILDQRFNTEKDEEGNTIRNVKIITLKSALTSQFRKQFGLYKVREINDYHHAHDAYLNAVVATTLLKVYPQLEPEFVYGEYRKSNAFKENKATAKKQFYSNIMKFFASEEPIIDENGEILWDKEKDIATVKKVLSYHQMNIVKKVEIQKGGFSKETIQPKGNSNKLIPRKNNWDPKKYGGFDSPTVAYSVVITYDIEKGKKKKLKRVKEIVGITIMERSAFEKNPIAYLEKKGYQNPKEDVLMKLPKYSLFELENGRRRMLASAKELQKGNQMVLPSHLVTLLYHAKRYIESNNSESLEYVNEHRQEFDELLDYVIDFSEKYILADKNLEKIKKLYEQNKEADIKELAKSFINLMTFTAMGAPADFKFFGETIPRKRYTSIKELLNATLIHQSITGLYETRIRLGELGED

SEQ ID NO: 21 - protein, 1340 aa, Artificial Sequence
  1340 residue - marginal ancestral sequence reconstruction method - node 73
MKKDYTIGLDIGTNSVGWAVITDDYDLVRKKMKVLGNTDKKSIKKNFWGVRLFDEGETAEDTRLKRTTRRRYTRRRNRISYLQEIFQEPMSEVDENFFHRLDESFLVPEDKKYDRHPIFGTLEEEVAYHETYPTIYHLRKHLADSSEKADLRLVYLALAHIIKYRGHFLIEGELNTENTSISETFEQFLDVYNQTFSEQELVDETIKVEEILTEKVSRSKKAENVLKLFPNEKSNGLFGQFLKLIVGNQGNFKKVFDLEEDIKLQFSKETYEEDLETLLGMIGDEYADVFLAAKNVYDAIELSGILSTTDKNTKAKLSASMIERYEEHKKDLAQLKQFIKAHLPDKYYEIFKDSSKNGYAGYIDGKTSQEDFYKYIKKILSKTDGAEYFLEKIEQENFLRKQRTFDNGVIPHQIHLEELRAILDRQSKYYPFLKENQEKIEQILTFRIPYYVGPLAKGNSRFAWLVRKSDEPIRPWNFDEVVDLEKSATKFIERMTNYDTYLPNEKVLPKHSLLYQKFTVFNELTKVRYIDDRGKTQNFSSEEKIEIFDDLFKQKRKVTKKDLVNYLENEYQYIDSPTIKGIEDSFNASFSTYHDLLKIGVSKEFLDDPENEEILEDIIKILTVFEDRKMIRKQLEKYSDILSEETLKKLERRHYTGWGRLSKKLINGIRDKQSNKTILDYLIDDDGSNRNFMQLINDDTLSFKEEIEKAQSINETENLQEIVNDLPGSPAIKKGILQSLKIVDEIVEIMGYQPKNIVVEMARENQTTNRGKRNSKPRLKRLEEALKELDSNLLKEKPLDNEQLKNDRLYLYYLQNGKDMYTGQELDINNLSNYDIDHIIPQSFITDNSIDNRVLVSSKENRGKSDNVPSKEVVRKMKPFWQKLLKAGLISQRKFDNLTKAERGGLTEADKAGFINRQLVETRQITKHVANLLDQRFNTEKDEEGNTIRNVNIITLKSALTSQFRKKFGLYKVREINDYHHAHDAYLNAVVATTLLKVYPNLKPEFVYGEYRKSNMFKENKATAKKHFYSNIMKFFSSEEPIIDENGEILWDKEKDISTVKKVLSYRQMNIVKKVEKQKGRFYKETIHPKGNSNKLIPIKNNLDPKKYGGFDEPTVAYSVVITYDIEKGKKKKLKRVKEIVGIPIMERSAFEKNPTAYLEKTGYNNPKEDVLMELPKYSLFELENGRRRMLASAKELQKGNQMVLPSHLVELLYHAKRYIESNNSESLEYVNEHRQEFDELLDYVIDFSNKYISADKNLEKIKKLYEENKEADIKELAKSFINLMTFTAMGAPADFKFFGETISRKRYTSIKELLDSTLIYQSITGLYETRIRLEELGED

SEQ ID NO: 22 - protein, 1340 aa, Artificial Sequence
  1340 residue - marginal ancestral sequence reconstruction method - node  74
MKKNYTIGLDIGTNSVGWAVIKDDYTLVRKKMKVLGNTDKKKIKKNFWGVRLFDEGETAEDTRLKRTTRRRYQRRRNRISYLQEIFQEPMSEVDENFFHRLDESFLVPEDKKYDRHPIFGTLEEEVAYHDTYPTIYHLRKHLADSSEKADLRLVYLALAHIIKYRGHFLIEGELNTENTSISETFEQFLDTYNEIFSEQELVDEITKVEEILTEKVSRSRKAEQVLALFPNEKRNGLFGQFLKLIVGNQGNFKKVFDLEDDIKLQLSEETYEEDLETLLGMIDDEYADVFLAAKNVYDAIELSGILSTDDKNTKAKLSAQMIELYDEHKKDLAQLKQFIKAHLPDKYYEIFKDSSKNGYAGYIDGKTSQEDFYKYIKKVLKKTDNAEYFLEKIEQENFLRKQRSFYNGVIPHQIHLQELRAILDRQSKYYPFLKENRDKIESLLTFRIPYYVGPLAKGNSRFAWLERKSDEPIRPWNFDEIVDLEKSAEKFIERMTNYDTYLPDEKVLPKRSLLYQKFTVFNELTKVRYIDERGKTQNFSSQEKIEIFDDLFKQKRKVTKKDLVNYLENEYQYIDSPDIKGIEDSFNASFSTYHDLAKIGVSKEYLDDPENEEILEDIIKILTIFEDRKMRKKQLQKYSDTLSEETLKKLERKHYTGWGRLSKKLINGIRDEQSNKTILDYLIDDDGSNRNFMQLINDDTLSFKEKIEKAQTINETNNIQEIVNDLPGSPAIKKGILQSLKIVDEIIEIMGYQPKNIVVEMARENQTTKKGKNNSKARLKKLEEALKELDSNHVKEQPLDNEQLKNDRLYLYYLQNGKDMYTGQELDINNLSNYDIDHIIPQSFITDNSIDNRVLVSSTENRGKSDNVPSKDIVRKMKPFWKQLLKAGLISQRKFDNLTKAERGGLTEADRAHFINRQLVETRQITKHVANLLDQRFNTEKDEEGNTIRNINIVLLKSALTSQFRKKFGLYKVREINDYHHAHDAYLNAVVATTLLKVYPNLKPEFVYGEYRKNSMFKEDKATAKKHFYSNIMKFFSKEKLVNDENGEILWDKEKDLSTIKKVLSYKQMNIVKKVEKQKGRLFKETIHPKGNSNKLIPIKNNLDPKKYGGFSEPTVAYSVVITYDIEKGKKKKLKRVKEIVGIPIMDRKAFEKHPTAYLEKTGYNNPTEDVLHELSKYSLFELENGSRRMIASAKELQKGNQMVLPSHLVELLYHAKRYDESNNSESLEYVNEHRAKFDELLDYVIDFSNKYINADKNIEKIKKLYKENKEADVKELVESFINLMTFTAMGAPADFKFFGETISRKRYTSIKELLGSTLIFQSITGLYETRIRLEDLGED

SEQ ID NO: 23 - protein, 1340 aa, Artificial Sequence
  1340 residue - marginal ancestral sequence reconstruction method - node  75
MKKDYTIGLDIGTNSVGWAVITDDYDLVRKKMKVHGNTEKKSIKKNFWGVRLFDEGETAEDRRLKRTTRRRYTRRRNRISYLQEIFQEEMNKVDENFFHRLDESFLVPEDKKHDRHPIFGTLEEEVAYHEQYPTIYHLRKHLADSSEKADLRLVYLALAHIIKYRGHFLIEGELNTENTSVEETFKQFLQVYNQTFSEQEPVDETIDVEEILTEKVSRSKKAENVLKLFPNEKSNGMFAQFLKLIVGNQGNFKKVFDLEEDAKLQFSKETYEEDLETLLAKIGDEYADVFLAAKNVYDAIELSGILSTTDKNTKAKLSASMIERYEEHKKDLAQLKQFIKEHLPEKYYEIFKDSSKNGYAGYIEGKTSQEDFYKYIKKILEKIDGAEYFLEKIEQENFLRKQRTFDNGVIPHQIHLEELRAIIDRQGKYYPFLKENQEKIEQLLTFRIPYYVGPLAKGNSRFAWLTRKSDEPIRPWNFEEVVDLEKSATRFIERMTNYDTYLPNEKVLPKHSLLYQKFTVFNELTKVRYIDDRGKTQNFSSEEKQEIFDDLFKQNRKVTKKDLENYLKNEYQYIESPTIKGIEDSFNASFSTYHDFLKIGVSREVLDDEENEEMLEDIVKILTVFEDRKMIRKQLEKYSDVLDEEILKKLERRHYTGWGRLSKKLINGIRDKQSNKTILDYLIDDDGLNRNFMQLINDDNLSFKEEIEKAQSITETENLQEIVQDLPGSPAIKKGILQSLKIVDELVEIMGYQPKNIVVEMARENQTTSRGKRNSKPRLKRLEEALKELGSNLLKEHPTDNQALQNDRLYLYYLQNGKDMYTGQELDIHNLSNYDIDHIIPQSFITDNSIDNRVLVSSKENRGKSDNVPSKEVVKKMKPFWEKLYKAGLISQRKFDNLTKAERGGLTEDDKAGFINRQLVETRQITKHVANILHQRFNTEKDEEGNTIRNVKIITLKSALTSQFRKQFGLYKVREINDYHHAHDAYLNAVVATTLLKVYPQLEPEFVYGEYRKSNAFKENKATAKKQFYSNIMKFFASEEPIIDENGEILWDKSKDIATIKKVLSYHQMNIVKKVEIQKGGFSKETIQPKGNSNKLIPRKNNWDPKKYGGFDSPNVAYSVVITYDIEKGKKKKLKRVKEIVGITIMERSAFEKNPIAYLEKKGYQNPKEDVLMKLPKYSLFELENGRRRMLASAKEAQKGNQMVLPSHLVTLLYHAKRYIESNNSESLEYVNEHRQEFDELLDHVIDFSEKYTLADKNLEKIKKLYEQNKEADIKELAQSFINLMTFNAMGAPADFKFFGKTIPRKRYTSIKELLNATIIHQSITGLYETRRRLGDLGED

SEQ ID NO: 24 - protein, 1340 aa, Artificial Sequence
  1340 residue - marginal ancestral sequence reconstruction method - node  76
MKKDYTIGLDIGTNSVGWAVITDDYDLVRKRMKIHGNTEKKSIKKNFWGVRLFDEGETAEDRRLKRTTRRRYTRRRNRISYLQEIFQDEMNKVDENFFHRLNESFLVPEDKKHDRHPIFGTLEEEVAYHEQYPTIYHLRKHLADSNEKADLRLVYLALAHIIKYRGHFLIEGELNTENTSVEETFKQFLQEYNQTFSEQEPVDEDIDVEEILTEKVSRSRKAENVLKLFPNEKSNGMFAQFLKLIVGNQGNFKKVFDLEEDAKLQFSKETYEEDLETLLAKIGDEYADVFLAAKNVYDAIELSGILSTTDKNTKAKLSSSMIERYEEHKKDLAQLKQFIKEHLPEKYYEIFKDSSKNGYAGYIEGKTSQEDFYKYIKKILEKIDGAEYFLKKIEQENFLRKQRTYDNGVIPHQIHLEELRAIIDRQGKYYPFLLENQEKIESLLTFRIPYYVGPLAKGNSRFAWLIRKSDEPIRPWNFEEVVDLENSATRFIERMTNYDTYLPNEKVLPKHSLLYQKFTVFNELTKVRYIDDRGKECNFSSEEKQEIFDNLFKKNRKVTKKDLENYLKNEYQYIESPTIKGIEDNFNASFSTYHDFIKIGVSREVLDDEDNEEMLEDIVKILTVFEDRKMIRKQLEKYSDVLDEEILKKLERRHYTGWGRLSKKLINGIRDKQSNKTILDYLIDDDGLNRNFMQLINDDNLSFKEEIEKAQLTTETENLKDIVNNLPGSPAIKKGILQSLKIVDELVEIMGYQPKNIVVEMARENQTTSRGKRNSKQRLKRLEEALKELGSDLLKEHPTDNQALQNDRLYLYYLQNGKDMYTGQELDIHNLSNYDIDHIIPQSFITDNSIDNRVLVSSKENRGKSDNVPSKEVVKKMKPFWQKLYKAGLISQRKFDNLTKAERGGLTEDDKAGFINRQLVETRQITKHVANILHQRFNTEKDEEGNTIRNVKIITLKSALTSQFRKQFGLYKVREINDYHHAHDAYLNAVVATTLLKVYPQLEPDFVYGEYRKSNAFKENKATAKKQFYSNIMEFFSSEEPIIDENGEILWDKSKDIATIKKVLSYHQMNIVKKVEIQTGGFSKETIQPKGNSNKLIPRKNNWDPKKYGGFDSPNVAYSIVITYDIEKGKKKKLKRVKEIVGITIMERSAFEKNPIAYLEKKGYQNPKEDVLMKLPKYSLFELENGRRRLLASAKEAQKGNQMVLPSHLVTLLYHAKRYIESNNAESLEYVNEHRQQFDELLDHVIDFSEKYTLADKNLEKIKKLYEENKEADIKELAQSFINLMQFNKMGAPADFKFFGKTIPRKRYTSIKELLNATIIHQSITGLYETRRKLGKLGED

SEQ ID NO: 25 - protein, 1340 aa, Artificial Sequence
  1340 residue - marginal ancestral sequence reconstruction method - node  77
MKKDYTIGLDIGTNSVGWAVITDDYDLVRKRMKINGNTEKKSIKKNFWGVRLFDEGETAEDRRLKRTTRRRLTRRRNRISYLQEIFKDEMNKVDENFFHRLNESFYVPEDKKHDRHPIFGTLEEEVAYHKQYPTIYHLRKHLADSNEKADLRLVYLALAHIIKYRGHFLIEGELNTENSSVEETFKEFLQEYNQTFSLQPPVDEDIDVEAILTEKVSRSRKAENVLNLFPTEKSNGMFHQFLKLIVGNQGNFKKVFDLEEDAKLQFSKETYEEDLEALLAKIGDEYADVFLAAKNVYDAIELSGILSTTDNNTKAKLSSSMIERYEEHKKDLAALKQFIKEHLPEKYYEIFRDSSKNGYAGYIEGKTSEEDFYKYIKKILEKIDGAEYFIKKIDQENFLRKQRTYDNGVIPHQIHLEELRAIIERQGKYYPFLLENQEKIESLLTFRIPYYVGPLAKGNSKFAWIERKSDEPIRPWNFEEVVDLESSATRFIERMTNYDTYLPNEKVLPKHSLLYQKFTVFNELTKVRYIDDRGKECNFSSKEKQEIFDNLFKKNRKVSKKDLENYLKNEYQYIESPTIKGIENNFNASFSTYHDFIKIGVSREVLDNEDYEEMLEDIVKILTVFEDRKMIRKQLEKYSDVLDEEILKKLERRHYTGWGRLSKKLINGIRDKQTQKTILDYLIDDDALNRNFMQLINDDNLSFKKEIEKAQLKTESENLKDIVDNLPGSPAIKKGILQSLKIVDELVEIMGYEPKNIVVEMARENQTTSQGKRNSKQRLKRIEEALKELGSDLLKEHPTDNQALQNDRLYLYYLQNGKDMYTGQELDIHNLSNYDIDHIIPQSFITDNSIDNRVLVSSKENRGKSDNVPSEEVVKKMKPFWSKLYKAGLISQRKFDNLTKAERGGLTEDDKAGFINRQLVETRQITKHVASILHQRFNTENDEEGNTIRNVKIITLKSALTSQFRKQFGLYKVREINDYHHAHDAYLNAVVATTLLKVYPQLEPDFVYGEYRKSNAFKENKATAKKQFYSNLMEFFSSEEPIIDENGEILWDKSKDIATIKKVLSYHQMNIVKKVEIQTGGFSKETIQPKGESNKLIPRKNNWDPKKYGGFDSPNVAYSIVITHDIEKGKKKKLKRVKEIVGITIMERSIFEKNQIAYLENKGYVNPKEDVLMKLPKYSLFELENGRRRLLASANEAQKGNQMVLPSHLVTLLYHAKRYIESNNAESEEYVNEHRHQFDELLDHVIDFSEKYTLADTNLEKIKKLYEENKEAEIKELAQSFINLMTFNKMGAPADFKFFGKNIPRKRYTSIKELLNATIIHQSITGLYETRRKLGKLGED

SEQ ID NO: 26 - protein, 1340 aa, Artificial Sequence
  1340 residue - marginal ancestral sequence reconstruction method - node  78
MKKQYTIGLDIGTNSVGWAVISDDYDLIRKRMKINGDHEKGSMKKNFWGVRLFDEGETAEDRRIRRTTRRRLRRRRNRVHYLQSIFKDEMNKVDENFFHRLNESFYVPMDKEHDRHPIFGTLEEEVAYHKQFPTIYHLRKYLADSNEQADLRLVYLALAHIIKYRGHFLIEGELNTENSSVEETFKDFLHHYNQTFSLQPPISEDISVEADLTEKVSRSRKAENVLNKFGTEKSNGMFHQFLKLIVGNQGNFKKVFSLDEDRKLNITKETYEEDLEALLAEIGEDYRELFLAAKNVHDAIELSGILSVADDKTKASLSSSMIERYEEHKQDLSALKNFIKAHLPDRYYDIFRNSSKNGYAGYIEGKTSEEDFYKYLKKVLDKVDGAESFIKKIDEERFLRKQRTYDNGVIPHQIHLEELRAIIEKQGQYYPFLLENQEKIESLLTFRIPYYVGPLAKGQSKFAWIERKGDESIRPWNIEEEVDLVSSAEKFIEKMTNYDTYLPNEKVLPKHSLLIQKFNVFNELTKVQYVDDQGKRCNFSSKEKQEIYDNLFKKNRTVSKKDLEDYLKNEYQYLENPTIKGIENKFNASLKTYHDFIKLGVSRDVLDNENYEERLEDIVKILTVFEDRKMIRKQLEKFSDVLDQDILKKLERRHYTGWGRLSQKLIDGIRDEHTQKTILDYLIDDDAPNRNFMQLINDDDLSFKKTIEEARLKTESDNLKDIVDKIPGSPAIKKGILQSLKIVDEIVEIMGYEPESIVVEMARENQTTSQGQRNAKERLKRIEEALKELKSDLLKKHPVDQEALQNDRLYLYYLQNGKDMYTNQELDINNLSNYDIDHIIPRSFTTDNSIDNRVLVSSKDNRGKSDDVPSEEVVKNMKPFWSSLYRSNLISKRKFDNLTKAERGGLTEDDKAGFIKRQLVETRQITKHVASILHQRYNTENDEEAHTIRNVKIITLKSALTSQFRKAFDLYKVREINDYHHAHDAYLNAVVATLLLKVYPQLEPDFVYGEYRKTNAFKENKATAKKQFYSNLIERFSHEDQIIDENGEIVWDKSKDIAKIKRVLSYHQMNIVKKVEIQTGNFSKETVQPKGESNKLIPRKKDWDPKKYGGFDSPNVAYSIIFTHDIEKGKKKKLKEVKEIIGITIMDQSIFEADQIKYLENKGYVNPKEDIKFKLPKYSLFELENGRRRLLASANEAQKGNQMVLPSHLVTLLYHCKRYIDSSNADHETYINENRHQFNELLDHVLNFSAQYTLAEANEEKIKKLYEENNQAEVSELATSFINLMDFNKMGAPSAFKFFGTNIERKRYTSIKELLNATIIYQSITGLYETRKEVGKLGED

SEQ ID NO: 27 - protein, 1340 aa, Artificial Sequence
  1340 residue - marginal ancestral sequence reconstruction method - node  79
MKKEYTIGLDIGTNSVGWAVLTDDYDLVRKKMKVHGNTEKKSIKKNFWGVRLFDEGETAEDRRLKRTTRRRYTRRRNRISYLQEIFQEEMNKVDENFFHRLDESFLVPEDKKHDRHPIFGTLEEEVAYHEQYPTIYHLRKHLADSSEKADLRLVYLALAHIIKYRGHFLIEGELNTENTSVEETFKQFLQVYNQTFSEQEPVDETIDVEEILTEKVSRTKKAENVLKLFPNEKSNGMFAQFLKLIVGNQGNFKKVFDLEEDAKLQFSKETYEEDLEALLAKIGDEYADVFLAAKNVYDAVELSGILSTTDKNTKAKLSASMIERYEEHKKDLAQLKQFIKENLPEKYHEIFKDSSKNGYAGYIEGKTSQEDFYKYIKKILEKIDGAEYFLEKIEQENFLRKQRTFDNGVIPHQIHLEELRAIIDRQAKYYPFLKENQEKIEQLLTFRIPYYVGPLAKGNSRFAWLTRKSDEPIRPWNFEEVVDLEKSATRFIERMTNYDTYLPNEKVLPKHSLLYQKYMVFNELTKVSYIDDRGKTQNFSSEEKQEIFDDLFKQNRKVTKKDLENFLRNEYNYIESATIKGIEDSFNASFSTYHDFLKIGVTQEVLDDPENEEMLEDIVKILTVFEDRKMIRKQLSKYSDVLDEEVLKKLERRHYTGWGRLSKKLINGIRDKQSNKTILDYLINDDGLNRNFMQLINDDNLSFKEEIEKAQSITDTENLQEIVQDLPGSPAIKKGILQSLKIVDELVEIMGYQPKNIVVEMARENQTTSRGRRNSKPRLKALEEALKELGSNLLKEHPTDNQALQNDRLYLYYLQNGKDMYTGQELDIHNLSNYDIDHIIPQSFITDNSIDNRVLVSSKENRGKSDDVPSKEVVKKMKPFWEKLYRAGLISQRKFDNLTKAERGGLTEDDKAGFIQRQLVETRQITKHVANILHQRFNSEKDEEGNTIRKVRIITLKSALTSQFRKQFGLYKVREINDYHHAHDAYLNGVVATTLLKVYPQLEPEFVYGEYHKFNAFKENKATAKKQFYSNIMKFFASDEPIIDENGEILWDKSKNIATVKKVLNYHQMNIVKKVEIQKGGFSKETIQPKGDSNKLIPRKNNWDPKKYGGFDSPNVAYSVVITYDIEKGKKRKLKRVKEIVGITIMERSAFEKNPIAFLENKGYQNPKEDVLMKLPKYTLFELENGRRRMLASAKEAQKGNQMVLPAHLVTLLYHAKHYDESNNSESLEYVNEHRQEFSEILEHVIDFAEKYTLADKNLEKIQKLYEQNQEADIKELAQSFVNLMQFNAMGAPADFKFFGKTIPRKRYTSIKELLNATIIHQSITGLYETRRRLGDLGED

SEQ ID NO: 28 - protein, 1340 aa, Artificial Sequence
  1340 residue - marginal ancestral sequence reconstruction method - node  80
MKKEYTIGLDIGTNSVGWAVLTDDYRLVAKKMKVHGNTEKKSIKKNFWGVRLFDEGQTAEARRSKRTTRRRLARRRNRILELQEIFAEEILKIDEHFFARLDESFLVPEDKKHSRHPIFATLEEEKSYHQTYPTIYHLRQHLADSSEKADIRLVYLALAHILKYRGHFLIEGELNTENTSVEETFRQFLQTYNQQFSEPEPVDESVDVAVILTEKLSKTKKAEKVLKYFPNEKSNGYFAQFLKLMVGNQGNFKKVFDLEEEAKLQFSKETYEEDLEELLEKIGDEYADVFLQAKNVYDAILLSEILSTTTKNTKAKLSAGMIERYEEHKKDLAQLKQFVKENLPEKYHELFKDSSKNGYAGYIEGKTTQEDFYKFVKKELSGIDGSEPFLEKIEQENFLRKQRTFDNGVIPHQIHLTELRAIIDRQKKYYPFLKEAQEKIESLLTFRIPYYVGPLAKGQSPFAWLIRKSEEKIKPWNFEEVVDMEKSAMRFIERMTNYDTYLPNEKVLPKHSLLYQKFMIFNELTKVSYKDERGKTHYFSSEEKREIFDELFKKNRKVTKKDLQNFLYLNYNYIENAEIKGIEKAFNASYSTYHDFLKLSEMEEWLEDPEMESMFEDIVKILTVFEDREMIRTQLSKYEAVLGEEILKKLAKKHYTGWGRLSKKLIQGIRDKQSNKTILDYLINDDGFNRNFMQLINDDNLSFKEEIEKAQAITDTENLQEIVKDLPGSPAIKKGILQSLKIVDELVEIMGYEPKNIVVEMARENQTTSRGLKNSKPRLKALEEALKDFGSQLLKEHPTDNQALQKDRLYLYYLQNGKDMYTGEPLDIHRLSDYDIDHIIPRSFITDNSIDNKVLVSSKENRGKKDDVPSEKVVKKMRPFWEKLYRAKLISQRKFDNLTKIERGGLTEEDKAGFIQRQLVETRQITKHVANILHQRFNSKKEDEGKAIRKVRIITLKSALTSQFRKTFGIYKVREINDYHHAHDAYLNGVVAIALLKKYPQLAPEFVYGEYLKFNAHKENKATAKKEFYSNIMKFFESDEPICDENGEIFWDKSKNIAQIKKVISYHQMNIVKKVEIQKGGFSKETVQPKGNSNKLIPRKNNWDPAKYGGFGSPNVAYTVAFTYDIEKGKARKLKRAKAIEGITIMERSAFEQNPIAFLKNKGYENAKEDVLMKLPKYTLFELENGRRRMVASHKEAQKANSFILPEHLVTLLYHAKHYDEISHKESFDYVNEHRSEFSEILDHVIDFAGKYTLADKNIEKIQKLYEENQEDDIAELAQSFVNLMQFNAMGAPADFKFFDVTIPRKRYTSLTEIWDATIIHQSITGLYETRIRMGNLGEQ

SEQ ID NO: 29 - protein, 1340 aa, Artificial Sequence
  1340 residue - marginal ancestral sequence reconstruction method - node  81
MKKEYTIGLDIGTNSVGWAVLTDDYRLVAKKMSVHGNTEKKKVKKNFWGARLFDEGQTAEARRSKRTTRRRLARRRNRILELQEIFAEEILKIDEHFFARLDESFLVPEDKKYTRFPIFPTLEEEKSYHQTYPTIYHLRQHLADSTEKADIRLVYLALAHILKYRGHFLFEGELDTENTSVEETFRQFLQVYNQQFSEPEPVDESEGVAVILTEKLSKTKKVEKVLKYYPNEKSNGYFAQFLKLIVGNQGNFKKVFDLEEEAKLQFSKETYEEDLEELLEKIGDEYADVFLQAKNVYDAILLSEILSTTKKNTKAKLSAGMIERYEEHKKDLAKLKQFVKENLPEKYAEFFKDSSKNGYAGYIEGKTTQEDFYKFVKKELSGIDGSEPFLEKIDQENFLLKQRTFANGVIPHQIHLTELRAIIDRQKKYYPFLKEAQEKIEQLLTFRIPYYVGPLAQGQSPFAWLERKSAEKITPWNFEEVVDMEKSAMRFIERMTNQDTYLPTEKVLPKHSLLYQKFMIFNELTKVSYKDERGKTHYFSSEEKREIFDELFKKHRKVTKKKLQNFLYLNYNYIENAEIKGIEKAFNASYSTYHDFLKLAEMEEWLEDPEMESMFEDIVKILTIFEDREMIRTQLSKYEAVLGEQVLKKLAKKHYTGWGRLSEKLIQGIRDKQSNKTILDYLIDDDDFNRNFMQLINDDHLSFKEEIAKALAISDSESLLEVVKALPGSPAIKKGIWQSLKIVEELVEIMGYNPKNIVVEMARENQTTSRGLKNSKPRLKALEEALKNFGSPLLKEHPTDNQALQKDRLYLYYLQNGKDMYTGEPLDIHRLSEYDIDHIIPRSFIVDNSIDNKVLVSSKENRGKMDDVPSEKVVKKMRPFWEKLQRAKLISERKFANLTKIERGGLTEEDKARFIQRQLVETRQITKHVANILHQHFNQKKEDEGKASGKVRIITLKSTLTSQFRKTFGIYKVREINNHHHAHDAYLNGVVAIALLKKYPKLAPEFVYGNYIKFNLHKENKATAKKEFYSNIMKFFESEEPSCDENGEIFWDKSRNIAQIKKVISSHQVNIVKKVEIQKGGFYKETVNPKGNPDKLIPRKNNWDPSKYGGFGSPVVAYTVAFIYDIEKGKARKLKRAKAIEGITIMEQSAFEQDPIAFLKNKGYENVKEDEFMKLPKYTLFELENGRRRMVASHKEAQKANSFILPEHLVTLLYHAQHYDEISHKESFDYVNEHRSEFSEILDHVIDFAGRYTLADKNIEKIQKLYEQNQEDDIAELAQSFVNLMQFNAMGAPADFKFFDVTIPRKRYTSLTEIWDATIIYQSITGLYETRIRMGNLGEQ

SEQ ID NO: 30 - protein, 1340 aa, Artificial Sequence
  1340 residue - marginal ancestral sequence reconstruction method - node  82
MAKDYTIGLDIGTNSVGWAVLTDDYRLMAKKMSVHGNTEKKKVKKNFWGARLFDEGQTAEARRSKRTTRRRLARRRNRILELQEIFAEEILKIDEHFFVRLDESFLVPEDKQYTRFPIFPTLEEEKSYYQTYPTIYHLRQKLADSTEKADIRLVYLALAHILKYRGHFLFEGELDTENTSVEETFKQFLEIYNQQFDQPLAVDESEGVAVILTEKLSKTKKVEKILKYYPTEKTNGCFAQFLKLIVGNQGNFKKVFDLEEEAKLQFSKETYEEDLESLLEKIGDEYADVFLQAKKVYDAILLSEILSTTKKNTKAKLSAGMIERYESHKKDLAKLKQFVKENLPEKTAVFFKDSSKNGYAGYIEGKTTQEDFYKFVKKELSGIVGSEPFLEKIDQENFLLKQRTFANGVIPHQVHLTELKAIIDRQKQYYPFLEEARDKIISLLTFRIPYYVGPLAQGQSSFAWLERKTAEKITPWNFTEVVDIEKSAMRFIQRMTNQDTYLPTEKVLPKHSLLYQKYMIFNELTKVSYKDERGIKHYFSSEEKREIFKELFQKQRKVTVKKLQNFLYANYNYIENAEILGIEKAFNASYSTYHDFLKLAKMQEWLEQPEMESMFEDIVKILTIFEDREMIRTQLSKYQAVLGEKLLKKLAKKHYTGWGRLSEKLIHGIRDKKTNKTILDYLIDDDDFNRNFMQLINDDHLSFKEEIAKALALSDNQSLLEVVQALPGSPAIKKGIWQSLKIVEELIEIIGYNPKNIVVEMARENQKTNRGLKNSKPRLKALEEALKNFGSPLLKEQPTDNQALQKDRLYLYYLQNGKDMYTGEPLDIDRLSEYDIDHIIPRSFIVDNSIDNKVLVSSKENRGKMDDVPSEKVVKKMRRFWEKLQRAKLISERKFAYLTKIERGGLTPEDKARFIQRQLVETRQITKHVANILHQHFNQPQEDEGKGCGKVRIITLKSTLTSQFRKTFGIYKVREINNHHHAHDAYLNGVVAIALLKKYPKLAPEFVYGNYIKFNLAKENKATAKKEFYSNILKFFESEEPSCDENGEIFWDKSRHIPQIKKVISSHQVNIVKKVEVQKGGFYKETVNPKGKPDKLIQRKNNWDVSKYGGFGSPVVAYAVAFIYDIEKGKARKLKKAKAIEGITIMEQSAFEQDPIAFLKNKGYSNVTEDKFIKLPKYTLFELENGRRRMVASHKEAQKANSFILPEQLVTLLYHAQHYDEISHKESFDYVNDHLSEFSEILDQVIDFAGRYTLADKNIEKIQELYEQNQEGDTQNLAQSFINLMQFNAMGAPADFKFFDVTIPRKRYTSLTEIWDATIIYQSITGLYETRIRMGNLGEQ

SEQ ID NO: 31 - protein, 1340 aa, Artificial Sequence
  1340 residue - marginal ancestral sequence reconstruction method - node  83
MKKEYTIGLDIGTNSVGWAVLTDDYDLVKKKMKVYGNTEKKSIKKNFWGVRLFDEGETAEDRRLKRTTRRRYTRRRNRISYLQEIFQEEMNKVDENFFHRLDESFLVPEDKKHDRHPIFGTLEEEVAYHEQYPTIYHLRKHLADSSEKADLRLVYLALAHIIKYRGHFLIEGKLNTENTSVEETFKQFLQVYNQTFSEQEPVDETIDVEEILTEKVSRTKKAENVLKLFPNEKSNGMFAQFLKLIVGNQGNFKKVFDLEEDAKLQFSKETYEEDLEALLAKIGDEYADVFVAAKNVYDAVELSGILTVTDKNTKAKLSASMIERYEEHKKDLKQLKQFIRENLPEKYHEIFKDSSKNGYAGYIEGKTSQEDFYKYIKKILEKIDGAEYFLEKIEQENFLRKQRTFDNGVIPHQIHLEELRAIIHRQAKYYPFLKENQEKIEQLLTFRIPYYVGPLANGNSRFAWLTRKSDEPIRPWNFEEVVDLGKSATAFIERMTNYDTYLPNEKVLPKHSLLYQKYMVFNELTKVSYIDDRGKTQNFSSEEKQQIFDDLFKQNRKVTKKDLENFLRNEYNYIESATIKGIEDSFNASFSTYHDFLKIGVTQEVLDDPENEEMLEDIVKILTVFEDRKMIREQLSKYSDVLDEEVLKKLERRHYTGWGRLSAKLINGIRDKQSNKTILDYLINDDGLNRNFMQLINDDNLSFKEEIEKAQSTTNTEDLQEIVQDLAGSPAIKKGILQSLKIVDELVEIMGYPPKNIVVEMARENQTTSRGRRNSKPRLKALEEAMKELGSNLLKEHPTDNQALQNDRLYLYYLQNGKDMYTGQELDIHNLSNYDIDHIIPQSFITDNSIDNRVLVSSTENRGKSDDVPSKEVVKKMKAFWEKLYRAGLISQRKFDNLTKAERGGLTEDDKAGFIQRQLVETRQITKHVANILHQRFNSEKDEEGNTIRKVRIITLKSALTSQFRKQFGLYKVREINDYHHAHDAYLNGVVATTLLKVYPQLEPEFVYGEYHKFNAFKENKATAKKQFYSNIMKFFASDEPIIDENGEILWDKSKNIATVKKVLNYHQMNIVKKVEIQKGGFSKETIQPKGDSNKLIPRKNNWDPKKYGGFDSPNVAYSVVITYDIEKGKKRKLKRVKEIVGITIMERSAFEKNPIAFLEEKGYQNPKEDVLMKLPKYTLYELENGRRRMLASAKEAQKGNQMVLPAHLVTLLYHAKHCDESNNGESLEYVNEHRAEFSEILEHVIDFAEKYTLADKNLEKILKLYEQNQEADIKEIAQSFVNLMQFNAMGAPADFKFFGKTIPRKRYTSIKELLNATIIHQSITGLYETRRRLGDLGED

SEQ ID NO: 32 - protein, 1340 aa, Artificial Sequence
  1340 residue - marginal ancestral sequence reconstruction method - node  84
MKKEYTIGLDIGTNSVGWAVLTEDYDLVKKKMKVYGNTEKKYIKKNFWGVRLFDEGETAEDRRLKRTTRRRYTRRRNRISYLQEIFQEEMNKVDENFFHRLDESFLVPEDKKHERHPIFGTLEEEVAYHEQYPTIYHLRKHLADSSEKADLRLVYLALAHIIKYRGHFLIEGKLNTENTSVEETFKTFLQVYNQTFSEQEPVDETIDIEEIFTEKVSRAKKAENVLKLFPNEKSNGTFAQFLKLIVGNQGNFKKTFDLEEDAKLQFSKEEYEEDLEALLAKIGDEYADVFAAAKNVYDAVELSGILTVTDNNTKAKLSASMIERYEEHKKDLKQLKQFIRKNLPEKYHEIFKDSSKNGYAGYIENSTSQEDFYKYIKKILEKIDGAEYFLEKIEQENFLRKQRTFDNGVIPHQIHLEELRAIIHRQAKYYPFLKENQEKIEQLLTFRIPYYVGPLANGNSRFAWLSRKSDEPIRPWNLAEVVDLGKSATAFIERMTNYDTYLPNEKVLPKHSMLYEKYMVFNELTKVSYIDDRGKTQNFSSEEKQQIFDDLFKQNRKVTKKDLENFLRNEYNYIESATIKGIENSFNASFSTYHDFLKIGITQEVLDDPENEEMFEEIVKILTVFEDRKMIREQLSKYSDVLDEEVLKKLERRHYTGWGRLSAKLINGIRDKQSNKTILDYLINDDGLNRNFMQLINDDNLSFKEEIEKAQSETNTEDLHEIVQDLAGSPAIKKGILQSLKIVDELVEIMGYPPKNIVVEMARENQTTSRGRRNSKPRLKALEEAMKELGSNLLKEHPTDNQALQNDRLYLYYLQNGKDMYTGQELDIHNLSNYDIDHIIPQSFITDNSIDNRVLVSSTENRGKSDDVPSKEVVKKMKAFWEKLYRSGLISQRKFDNLTKAERGGLTEDDKAGFIQRQLVETRQITKHVARILHQRFNSEKDEEGNTIRKVRIITLKSALTSQFRKQFGLYKVREINDYHHAHDAYLNGVVATTLLKVYPQLEPEFVYGEYHKFNAFKENKATAKKQFYSNIMKFFASDEPIIDENGEILWDKSKNIATVKKVMNYHQMNIVKKVEIQKGGFSKETIQPKGDSDKLISRKNNWDPKKYGGFDSPNVAYSVVITYDIEKGKKRKLKRVKEIVGITIMERSAFEKNPVAFLEEKGYQNPKEDVLMKLPKYTLYELENGRRRLLASAKEAQKGNQMVLPAHLVTLLYHAKHCDESNNGESLEYVNEHRAEFSEILEHVKDFAEKYTLADKNLEKILKLYEQNQEADIKEIAQSFVNLMQFNAMGAPADFKFFGKTIPRKRYTSIKELLNATIIHQSITGLYETRRRLGDLGED

SEQ ID NO: 33 - protein, 1340 aa, Artificial Sequence
  1340 residue - marginal ancestral sequence reconstruction method - node  85
MKKEYTIGLDIGTNSVGWAVLTENYDLVKKKMKVYGNTEKKYIKKNFWGVRLFDEGETAEDRRLKRTTRRRYTRRRNRISYLQEIFQEEMNKVDENFFHRLDESFLVPEEKRHERHPIFGTLEEEVAYHEQFPTIYHLRKHLADSSEKADLRLVYLALAHIIKYRGHFLIEGKLNTENSSVEETFKTFLQVYNQTFSEQEPVDETIDIEEIFTEKVSRARKAENVLKLFPNEKSNGTFAQFLKLIVGNQGNFKKTFDLEEDAKLQFSKEEYEEELEALLAIIGDEYADVFAAAKNVYDAVELSGILTVTDNNTKAKLSASMIERYEEHKKDLKQLKQFIRKELPEKYHEIFRDSSKNGYAGYIENSVSQAEFYKYIKKILEKIPGAEYFLEKIEQENFLRKQRTFDNGVIPHQIHLEELRAIIHKQAKYYPFLKENQEKIEQLLTFRIPYYVGPLADGNSRFAWLSRKSDEPIRPWNLAEVVDLGKSATAFIERMTNYDTYLPNEKVLPKHSMLYEKYMVFNELTKVSYIDDRGKTQNFSSEEKKQIFDELFKQNRKVTKKLLENFLRNEYNYIEDATIKGIENSFNASYGTYHDFLKIGITQEMLDDPENEEMFEEIVKILTVFEDRKMIREQLSKYSDVFDEEVLKKLERRHYTGWGRLSAKLINGIRDKQSNKTILDYLINDDGLNRNLMQLINDDNLSFKEEIAKAQSETNTEDLHEIVQDLAGSPAIKKGILQSLKIVDELVEIMGYPPKNIVVEMARENQTTSRGRRNSKPRLKALEEAMKELGSNLLKEYPTDNQALQNDRLYLYYLQNGKDMYTGQELDIHNLSNYDIDHIIPQSFITDNSIDNRVLVSSTENRGKSDDVPSKEVVKKMIAFWEKLKRSGLISQRKFDNLTKALRGGLTEDDKAHFIQRQLVETRQITKHVARILHQRFNSEKDEEGNTIRTVRIITLKSALTSQFRKQFGLYKVREINDYHHAHDAYLNGVVATTLLKVYPQLEPEFVYGDYHKFNAFKENKATAKKQFYSNIMKFFASDEPIIDENGEILWDKSKNIATVKKVMNYHQMNIVKKVEIQTGGFSKETIQPKGDSDKLISRKTNWDPKKYGGFDSPNVAYSVVITYDIEKGKKRKLKRVKEIVGITIMERSAFEKNPVAFLEEKGYQNPKEDVLMKLPKYTLYELENGRRRLLASANEAQKGNQMVLPAHLVTLLYHAKHCDESNNGKSLEYVNEHRAEFSEILEYVKDFAEKYTLADKNLEKILKLYEQNQEADIKEIAQSFVNLMQFNAMGAPADFKFFGKTIPRKRYTSIKELLNATIIHQSITGLYETRRRLGDLGED

SEQ ID NO: 34 - protein, 1340 aa, Artificial Sequence
  1340 residue - marginal ancestral sequence reconstruction method - node  86
MNKEYTIGLDIGTNSVGWAVLDENYDLVKKKMKIQGNGDKKKVKKNFWGVRLFDAGETAEGTRMKRTTRRRYTRRRNRISYLQEIFQGEMDKVDENFFHRLDDSFLVPEEKRNERHPIFATLEEEVAYHEQFPTIYHLRKHLADSTEKADLRLVYLALAHIIKYRGNFLIEGKLNTENSSVKETFKTFLQAYNQAFTVQEPVNETIDIGSLFQERVSRQRKAENVLKLFPNEKSNGTFMQFLKLIVGNQGNFKKTFGLEEDAKLQFSKEEYEEELEGLLAIVGDEYADVFAAAKNVYDAVELSGILTVKDINTKAKLSASLIKRYEEHKTDLEQLKKFVRKELPEKYYEVFRDSTKNGYAGYIENSVSQADFYKYLKKILEKIPGAEYFLEKIEQEDFLRKQRTFDNGVIPHQIHLEELRAIIRKQSRYYPFLKENQEKIEQILTFRIPYYVGPLADGNSRFAWLSRKTDGSIRPWNFTEVVDEGKSATAFIERMTNYDSYLPQEKVLPKHSMLYEKYMVFNELTKVSYIDDRGETQNFSSVEKKEIFDELFKKNRKVTYALLENFLKNQYMYIETAEIKGIEKSFNASYGTYHDLLKIGISQEMLDDPENEEMFEEIVKILTVFEDRKMIKEQLSKYADYFEAGVLKKLVRRHYTGWGRLSAKLINGIRDKQSKKTILDYLMRDDDLNRNLMQLINDDNLSFKESIAQQQSEDQTEDLHEIVKELAGSPAIKKGILQSLKIVDEIVEIMGYPPTNIVVEMARENQTTSRGRKKSKPRQKVLEEAMKEFGSNLLKEYPPDNANLRNDRLFLYYLQNGKDMYTGKELDIHNLSNYDIDHIIPQSFIKDNSIDNMVLVSSTENRGKSDDVPSKEVVEKMIGFWEKLKRSGLISQRKFDNLTKALNGGLTEADKAHFIQRQLVETRQITKHVARILHQKYNSEDEDEGNTIRTTRIITLKSALTSQFRQIYQLYKVREINDYHHAHDAYLNGVVATTLLKVYPRLEPEFVYGDYQKFNLFKENKATAKKNFYSNLMRFFASDQPKVDENGEILWDQSKNIAMVKKVMNYHQMNIVKKTEIQTGGFSKESIQPKGDSAKLIARKTEWDPKKYGGFDSPNIAYSVVITYDIEKGKKRKLKRVKEIVGITIMERRQFEKNEVEFLEEKGYQNPREDVLVKLPKYTLYELENGRRRLIASASEAQKGNQMVLPNHLVELLYHAKHCDDLNDGKSLAYLNAHRAEFNELFEYVKHFAERYTLADKNLKKLSKLYEQNQEADIKVMAQSFLNLMQFNAMGAPADFKFFDTTIPRKRYTSIKEILTATIIHQSITGLYETHWKLGELGED

SEQ ID NO: 35 - protein, 1340 aa, Artificial Sequence
  1340 residue - marginal ancestral sequence reconstruction method - node  87
MKKDYTIGLDIGTNSVGWAVLTDDYDLVKKKMKVYGNTEKKQIKKNFWGVRLFDEGETAEDRRLKRTTRRRITRRRNRISYLQEIFQEEMNKVDENFFHRLDESFLVPEDKKHDRHPIFATLEEEVAYHENYPTIYHLRKKLADSSEKADLRLVYLALAHIIKYRGHFLIEGKLNTENTSVEETFKQFIQTYNQTFANGEPLDESIDVEEILTEKVSRTKKAEKVLKLFPNEKSNGMFAQFLKLIVGNKGNFKKVFDLEEDAKIQFAKESYEEDLEALLAKIGDEYADVFVAAKNVYDAVELSSILTVTDKNTKAKLSASMIERFEEHKKDLKQLKQFIRENLPEKYNEIFKDSQKDGYAGYIEGKTSQEDFYKYIKKILENIDGAEYFLEKIEQENFLRKQRTFDNGVIPHQIHLEELQAIIHRQAKYYPFLKENQEKIEQLVTFRIPYYVGPLANGNSRFAWLTRKSDEPIRPWNLEEVVDLGKSATAFIERMTNYDTYLPNEKVLPKHSLLYQKYMVFNELTKVSYIDDRGKTQNFSGEEKQQIFDDLFKQKRKVKKKDLEQFLRNEYNYIESATIKGIEDSFNASFSTYHDLLKIGVTQEVLDDPENAEMLEDIVKILTVFEDRKMIREQLSKFSDVLDEEVLKKLERRHYTGWGRLSAKLINGIRDKQSNKTILDYLINDDGLNRNFMQLINDSNLSFKNEIEKAQSSTNDEDLQEIVNDLAGSPAIKKGILQSLKIVDELVEIMGYPPKNIVVEMARENQTTSRGKRNSKPRLKALEKAMKELGSNLLKEHPTDNQALRNDRLYLYYLQNGKDMYTGQELDIHNLSNYDIDHIIPQSFITDNSIDNRVLVSSTENRGKSDDVPSKEVVKKMKAFWEKLYRAGLISQRKFDNLTKAERGGLTEDDKARFIQRQLVETRQITKNVANILHQRFNSEKDEEGNTIRKVRIITLKSALTSQFRKQFGLYKVREVNDYHHAHDAYLNGVVATTLLKVYPQLEPEFVYGEYHKFNAFKENKATAKKQFYTNIMKFFAKDEPIIDENGEILWDKSKYLATIKKVLNYHQMNIVKKVEIQKGGFSKETIKPKGNSNKLIPRKNNWDPKKYGGFDSPNVAYSVVITYDIEKGKKRKLKRVKEIVGITIMERTAFEKNPIAFLEEKGYQNPKEDVLMKLPKYTLYELENGRRRMLASAKEAQKGNQMVLPAHLVTLLYHAKHCDESNNGESLAYVEEHRAEFSEILEHVIDFAERYTLADANLEKINKLFEQNQEADIKEIAQSFVNLMQFNAMGAPASFKFFEKTIERKRYTSIKELLNATIIYQSITGLYETRRRLGDLGED

SEQ ID NO: 36 - protein, 1340 aa, Artificial Sequence
  1340 residue - marginal ancestral sequence reconstruction method - node 88
MKKPYTIGLDIGTNSVGWAVLTDQYDLVKRKMKVAGNSEKKQIKKNFWGVRLFDEGETAADRRMNRTTRRRIERRRNRISYLQEIFAEEMSKVDANFFYRLEDSFYVESEKRHSRHPFFATIEEEVAYHENYRTIYHLREKLVNSSEKADLRLVYLALAHIIKYRGNFLIEGKLDTKNTSVDEVFKQFIQTYNQVFASDIRLEENKDVAKILSEKVTRREKLEKILKLYPGEKSTGMFAQFISLIVGSKGNFKKVFDLDEKTDIECAKDSYEEDLEALLAKIGDEYAEIFVAAKNAYNAVVLSSIITVTDTETKAKLSASMIERFDKHEKDLKQLKAFIKVHLPEKYNEIFNDVEKDGYAGYIDGKTKQEDFYKYMKKMLENIEGADYFIDKIEEENFLRKQRTFDNGAIPHQLHLEELEAILHQQAKYYPFLKENYEKIKSLVTFRIPYFVGPLANGQSEFAWLTRKADGEIRPWNIEEKVDFGKSAIDFIEKMTNKDTYLPKENVLPKHSLCYQKYMVYNELTKVRYIDDQGKTHYFSGQEKQQIFNDLFKQKRKVKKKDLEQFLRNMSNHIESPTIEGVEDSFNSSFATYHDLLKVGVTQEILDNPLNAEMLEDIVKILTVFEDKRMIKEQLQQFSDVLDGAVLKKLERRHYTGWGRLSAKLLIGIRDKQSHLTILDYLMNDDGLNRNLMQLINDSNLSFKSIIEKEQVSTADKDIQSIVADLAGSPAIKKGILQSLKIVDELVGIMGYPPQTIVVEMARENQTTGKGKNNSKPRFKSLEKAIKEFGSQILKEHPTDNQELRNDRLYLYYLQNGKDMYTGQELDIHNLSNYDIDHIVPQSFITDNSIDNRVLVSSAANREKGDDVPSLEVVRKRKVFWEKLYQANLMSKRKFDYLTKAERGGLTEADKARFIHRQLVETRQITKNVANILHQRFNCEKDENGNTIEQVRIVTLKSALVSQFRKQFQLYKVREVNDYHHAHDAYLNGVVANTLLKVYPQLEPEFVYGDYHQFDWFKANKATAKKQFYTNIMLFFAKKDRIIDENGEILWDKSKYLDTIKKVLSYRQMNIVKKTEIQKGEFSKATIKPKGNSSKLIPRKANWDPMKYGGFDSPNMAYAVVIEYDIEKGKKKKIIKEKEIIRITIMERTAFEKDQKAFLEEKGYRNPKEDVLTKLPKYTLYECENGRRRMLASANEAQKGNQMVLPNHLVTLLYHAKNCEASNDGKSLAYIESHREMFAELLAHVSEFAKRYTLADANLEKINQLFEQNKEGDIKVIAQSFVNLMAFNAMGAPASFKFFETTIERKRYNNLKELLNATIIYQSITGLYEARKRLDDLGED

SEQ ID NO: 37 - protein, 1340 aa, Artificial Sequence
  1340 residue - marginal ancestral sequence reconstruction method - node 89
MKKPYTIGLDIGTNSVGWAVLTDQYDLVKRKMKVAGNSEKKQIKKNFWGVRLFDEGETAADRRMNRTARRRIERRRNRISYLQEIFAEEMSKIDANFFCRLNDSFYVDSEKRNSRHPFFATIEEEVAYHKNYRTIYHLREELVNSSEKADLRLVYLALAHIIKYRGNFLIEGALDTKNTSVDGVYKQFIQTYNQVFASNIKLEENKDVAKILAEKVTRKEKLERILKLYPGEKSTGMFAQFISLIVGSKGNFQKVFDLVEKTDIECAKDSYEEDLEALLAIIGDEYAELFVAAKNAYNAVVLSSIITVTDTETNAKLSASMIERFDTHEKDLSELKAFIKLHLPKQYEEIFSNVEKDGYAGYIDGKTKQADFYKYMKTMLENIEGADYFIAKIEEENFLRKQRTFDNGAIPHQLHLEELEAILHQQAKYYPFLKENYDKIKSLVTFRIPYFVGPLANGQSEFAWLTRKADGEIRPWNIEEKVDFGKSAVDFIEKMTNKDTYLPKENVLPKHSLCYQKYMVYNELTKVRYIDDQGKTNYFSGQEKQQIFNDLFKQKRKVKKKDLEQFLRNMSHHIESPTIEGLEDSFNSSYATYHDLLKVGIKQEILDNPLNTEMLEDIVKILTVFEDKRMIKEQLQQFSDVLDGAVLKKLERRHYTGWGRLSAKLLVGIRDKQSHLTILDYLMNDDGLNRNLMQLINDSNLSFKSIIEKEQVSTADKDIQSIVADLAGSPAIKKGILQSLKIVDELVSIMGYPPQTIVVEMARENQTTGKGKNNSRPRYKSLEKAIKEFGSQILKEHPTDNQELRNNRLYLYYLQNGKDMYTGQELDIHNLSNYDIDHIVPQSFITDNSIDNLVLTSSAGNREKGDDVPPLEIVRKRKVFWEKLYQGNLMSKRKFDYLTKAERGGLTEADKARFIHRQLVETRQITKNVANILHQRFNYEKDDHGNTMEQVRIVTLKSALVSQFRKQFQLYKVREVNDYHHAHDAYLNGVVANTLLKVYPQLEPEFVYGDYHQFDWFKANKATAKKQFYTNIMLFFAQKDRIIDENGEILWDKSKYLDTIKKVLSYRQMNIVKKTEIQKGEFSKATIKPKGNSSKLIPRKTNWDPMKYGGLDSPNMAYAVVIEYDIAKGKKKKIVFEKKIIRITIMERKAFEKDEKAFLEEQGYRQPKEDVLTKLPKYTLYECENGRRRMLASANEAQKGNQQVLPNHLVTLLHHAKNCEASNDGKSLDYIESNREMFAELLAHVSEFAKRYTLADANLNKINQLFEQNKEGDIKVIAQSFVNLMAFNAMGAPASFKFFETTIERKRYNNLKELLNATIIYQSITGLYEARKRLDDLGED

SEQ ID NO: 38 - protein, 1340 aa, Artificial Sequence
  1340 residue - marginal ancestral sequence reconstruction method - node 90
MKKPYTIGLDIGTNSVGWAVLTDQYDLVKRKMKVAGNSEKKQIKKNFWGVRLFDEGETAADRRMNRTTRRRIERRRNRISYLQEIFAAEMSEVDANFFYRLEDSFYIESEKRHSRHPFFATIEEEVAYHENYRTIYHLREKLVNSSDKADLRLVYLALAHIIKYRGNFLIEGKLDTKNTSVDEVFKQFIQTYNQVFASDIRLEENKEVAKILSEKLTRREKLDKILKLYPGEKSTGMFAQFISLIIGSKGNFKKVFDLDEKTDIECAKDSYEEDLEALLAKIGDEYAEIFVAAKNAYNAVVLSSIITVTDTETKAKLSASMIERFDKHEKDLKRLKAFFKVHLPEKFNEVFNDVEKDGYAGYIDGKTKQEDFYKYMKKMLENIEGADYFIDQIEEENFLRKQRTFDNGAIPHQLHLEELEAILHQQAKYYPFLKEDYEKIKSLVTFRIPYFVGPLANGQSEFAWLTRKADGEIRPWNIEEKVDFGKSAIDFIEKMTNKDTYLPKENVLPKHSLCYQKYMVYNELTKIRYIDDQGKTHYFSGQEKQQIFNDLFKQKRKVKKKDLEQFLYNMINHIESPTIEGVEDAFNSSFATYHDLQKVGVTQEILDNPLNAEMLEEIVKILTVFEDKRMIKEQLQQFSDVLDGAVLKKLERRHYTGWGRLSAKLLIGIRDKQSHLTILDYLMNDDGLNRNLMQLINDSNLSFKSIIEKEQVSTADKDIQSIVADLAGSPAIKKGILQSLKIVDELVGIMGYPPQTIVVEMARENQTTGKGKNNSKPRFTSLEKAIKEFGSQILKEHPTDNQGLKNDRLYLYYLQNGKDMYTGQELDIHNLSNYDIDHIVPQSFITDNSIDNRVLVSSAANREKGDNVPSLEVVRKRKVFWEKLYQAKLMSKRKFDYLTKAERGGLTEADKARFIHRQLVETRQITKNVANILHQRFNCKKDENGNVIEQVRIVTLKSALVSQFRKQFQLYKVREVNDYHHAHDAYLNGVVANTLLKVYPQLEPEFVYGDYHQFDWFKANKATAKKQFYTNIMLFFAKKDRIIDENGEILWDKSKYLDTIKKVLSYRQMNIVKKTEIQKGEFSNATVNPKGNSSKLIPRKADWDPIKYGGFDGSNMAYAIVIEYDIEKRKKKTVIKEKELIQINIMERTAFEKDQKAFLEEKGYRNPKEDVLTKIPKYTLYECENGRRRMLGSANEAQKGNQMVLPNHLMTLLYHAKNCEASNDGKSLAYIESHREMFAELLAHISEFAKRYTLADANLEKINTLFEQNKEGDIKVIAQSFVNLMAFNAMGAPASFKFFETTIERKRYNNLKELLNATIIYQSITGLYEARKRLDDLGED

SEQ ID NO: 39 - protein, 1340 aa, Artificial Sequence
  1340 residue - marginal ancestral sequence reconstruction method - node 93
MKKPYSIGLDIGTNSVGWAVITDDYKVPAKKMKVLGNTDRQSIKKNLIGALLFDSGETAEATRLKRTARRRYTRRKNRICYLQEIFSNEMAKVDDSFFHRLEESFLVEEDKKYERHPIFGNLADEVAYHENYPTIYHLRKKLADSTEKADLRLIYLALAHIIKFRGHFLIEGDLNAENTDVQKLFHQLVDTYNQLFEEDQLDTEAIDAKAILTAKISKSRRLENLISQIPGQKKNGLFGNLIALSLGLTPNFKSNFDLSEDAKLQLSKDTYDEDLDNLLAQIGDQYADLFLAAKNLSDAILLSDILTVNDESTKAPLSASMIKRYEEHHQDLALLKQLVKEQLPEKYKEIFSDESKNGYAGYIDGKTSQEEFYKYIKPILEKLDGAEEFLAKINREDFLRKQRTFDNGSIPHQIHLGELHAILRRQEEYYPFLKDNQEKIEKILTFRIPYYVGPLARGNSRFAWLTRKSDEAITPWNFEEVVDKEASAQAFIERMTNFDEYLPNEKVLPKHSLLYEYFTVYNELTKVKYVTEGMTKPFLSAEQKQAIVDLLFKKNRKVTVKQLKEDYFKKIECFDSVDISGVEDRFNASLGTYHDLLKIIKDKDFLDNEENEDILEDIVLTLTLFEDREMIEKRLATYADLFDKKVLKQLKRRHYTGWGRLSRKLINGIRDKQSGKTILDFLKADGFANRNFMQLINDDSLSFKEEIEKAQVSGQTDSLHEQIADLAGSPAIKKGILQTIKIVDELVKVMGHNPENIVIEMARENQTTAKGIKNSRERMKRIEEVLKKLGSQILKEHPVENTQLQNERLYLYYLQNGKDMYTGQELDINNLSQYDIDHIIPQSFIKDDSIDNKVLTRSEENRGKSDNVPSIEVVKKMKSYWQKLLNAKLISQRKFDNLTKAERGGLSESDKAGFIKRQLVETRQITKHVAQILDSRFNTERDENDKPIRNVKVITLKSKLVSDFRKDFGFYKVREINDYHHAHDAYLNAVVGTALLKKYPKLESEFVYGDYKKYDDKERGKATAKMFFYSNIMNFFKTEVKLANETGEIVWDKEKDFATVRKVLSMPQVNIVKKTEVQTGGFSKESILPKGNSDKLIPRKNNWDPKKYGGFDSPTVAYSVLVVAKVEKGKAKKLKTVKELVGITIMERSAFEKNPIAFLEAKGYQDIQEDLIIKLPKYSLFELENGRRRLLASATELQKGNEMVLPAHLVTFLYHASRIDKSTSSENLEYVEQHKHEFDEILDYIIDFSERYILADKNLEKIKSLFNQNDDSDINELASSFINLFTFTSLGAPAAFKFLDTTIDRKRYTSTKEVLNATLIHQSITGLYETRIDLSQLGGD

SEQ ID NO: 40 - protein, 1340 aa, Artificial Sequence
  1340 residue - marginal ancestral sequence reconstruction method - node 94
MEKKYSIGLDIGTNSVGWAVITDDYKVPSKKFKVLGNTDRKSIKKNLIGALLFDSGETAEATRLKRTARRRYTRRKNRICYLQEIFSNEMAKVDDSFFHRLEESFLVEEDKKHERHPIFGNLADEVAYHENYPTIYHLRKKLADSTEKADLRLIYLALAHIIKFRGHFLIEGDLNAENSDVDKLFYQLVQTYNQLFEENPLDASGVDAKAILSARLSKSRRLENLIAQFPGEKKNGLFGNLIALSLGLTPNFKSNFDLAEDAKLQLSKDTYDDDLDNLLAQIGDQYADLFLAAKNLSDAILLSDILRVNSEITKAPLSASMIKRYDEHHQDLALLKALVRQQLPEKYKEIFSDQSKNGYAGYIDGGASQEEFYKFIKPILEKMDGAEELLAKLNREDLLRKQRTFDNGSIPHQIHLGELHAILRRQEEFYPFLKDNREKIEKILTFRIPYYVGPLARGNSRFAWLTRKSEETITPWNFEEVVDKGASAQSFIERMTNFDENLPNEKVLPKHSLLYEYFTVYNELTKVKYVTEGMRKPFLSGEQKKAIVDLLFKTNRKVTVKQLKEDYFKKIECFDSVEISGVEDRFNASLGTYHDLLKIIKDKDFLDNEENEDILEDIVLTLTLFEDREMIEERLKTYAHLFDDKVMKQLKRRHYTGWGRLSRKLINGIRDKQSGKTILDFLKSDGFANRNFMQLIHDDSLTFKEEIQKAQVSGQGDSLHEQIADLAGSPAIKKGILQTVKIVDELVKVMGHKPENIVIEMARENQTTTKGLKNSRERMKRIEEGIKELGSQILKEHPVENTQLQNEKLYLYYLQNGRDMYVDQELDINRLSDYDVDHIVPQSFIKDDSIDNKVLTRSDENRGKSDNVPSEEVVKKMKNYWRQLLNAKLITQRKFDNLTKAERGGLSEADKAGFIKRQLVETRQITKHVAQILDSRMNTKRDENDKPIREVKVITLKSKLVSDFRKDFQFYKVREINNYHHAHDAYLNAVVGTALIKKYPKLESEFVYGDYKVYDEQEIGKATAKRFFYSNIMNFFKTEVKLANETGEIVWDKEKDFATVRKVLSMPQVNIVKKTEVQTGGFSKESILPKRNSDKLIPRKKDWDPKKYGGFDSPTVAYSVLVVAKVEKGKAKKLKSVKELVGITIMERSSFEKNPIGFLEAKGYKDIQKDLIIKLPKYSLFELENGRRRMLASATELQKGNEMVLPAHLVTFLYHASKIEKSTSSENLAYIEQHKHEFDEILEYIIDFSERYILADKNLSKVKSLFNKHEDSDISELASSFINLFTFTSLGAPAAFKFLDTTIDRKRYTSTKEVLDATLIHQSITGLYETRIDLSQLGGD

SEQ ID NO: 41 - protein, 1340 aa, Artificial Sequence
  1340 residue - marginal ancestral sequence reconstruction method - node 96
MKKPYSIGLDIGTNSVGWAVITDDYKVPAKKMKVLGNTDRKTIKKNLIGALLFDSGETAEATRLKRTARRRYTRRKNRICYLQEIFSEEMAKVDDSFFQRLEESFLVPEDKEYDRHPIFGNLADEVAYHKNYPTIYHLRKKLADSTQKADLRLIYLALAHIIKFRGHFLIEGDLNSENTDVQKLFHQLVDTYNLLFEEDPLDTETIDAKAILTAKISKSRRLENLISQIPGQKKNGLFGNLIALSLGLTPNFKSNFGLSEDAKLQLSKDTYEEDLDNLLAQIGDQYADLFLAAKNLSDAILLSDILTVSDENTKAPLSASMIKRYEEHQQDLALLKQLVKEQLPEKYKEIFSDKSKNGYAGYIDGKTSQEEFYKYIKPILSKLDGAEEFLAKIDREDFLRKQRTFDNGSIPHQIHLEELHAILRRQEEYYPFLKDNQEKIEKLLTFRIPYYVGPLARGNSRFAWLKRKSDEAITPWNFEEVVDQEASAQAFIERMTNFDTYLPNEKVLPKHSLLYETFTVYNELTKVKYVTEGMTKPFLSAEQKQAIVDLLFKKNRKVTVKQLKENYFKKIECFDSVDITGVEDRFNASLGTYHDLLKIIKDKDFLDNEENQDILEDIVLTLTLFEDKKMIEKRLAKYADLFDKSVLKKLKRRHYTGWGRLSRKLINGIRDKQSGKTILDFLKADGFANRNFMQLINDSSLSFKEEIEKAQVIGKTESLKEVVANLAGSPAIKKGILQTIKIVDELVKVMGHNPENIVIEMARENQTTAQGIKNSRQRMKKLEEVLKKLGSNILKEHPVDNTQLQNDRLYLYYLQNGKDMYTGQDLDIDNLSQYDIDHIIPQSFIKDNSIDNKVLTSQEANRGKSDNVPSIEVVRKMKSYWQKLLKAGAISQRKFDNLTKAERGGLTESDKAGFIKRQLVETRQITKHVAQILDSRFNTELDENNKRIRNVKIITLKSKLVSDFRKDFGLYKVREINDYHHAHDAYLNAVVGTALLKKYPKLEPEFVYGDYKKYDDKERGKATAKMFFYSNIMNFFKTEVKLANETGEIVWDKEKDFATIRKVLSYPQVNIVKKTEVQTGGFSKESILPKGNSDKLIPRKNNWDPKKYGGFDSPTVAYSVLVVAKVEKGKAKKLKTVKELVGITIMERSAFEKNPIAFLEAKGYQDIQEHLIIKLPKYSLFELENGRRRLLASAKELQKGNELVLPAHYVTFLYLASRYDKLTSSEDLHFVEQHLHYFDEILDIIIDFSERYILADSNLEKIKSLYNQNDDFSINEQASNMINLFTFTALGAPAAFKFFDATIDRKRYTSTKEVLNATLIHQSITGLYETRIDLSQLGGD

SEQ ID NO: 42 - protein, 1340 aa, Artificial Sequence
  1340 residue - marginal ancestral sequence reconstruction method - node 97
MRKPYSIGLDIGTNSVGWAVITDDYKVPAKKMKVLGNTDRKTIKKNLIGALLFDSGETAEATRLKRTARRRYTRRKNRICYLQNIFSDEMAKVDDAFFQRLSESFLVPEDKEFDRHPIFGNLKDEVAYHKNYPTIYHLRKKLADSDQKADLRLIYLALAHIIKFRGHFLIEGDLNSENTDVQKLFLQLVDTYNLLFEEDPIDTETIDAKAILTAKTSKSRRLENLISEIPGQKKNGLFGNLIALSLGLTPNFKSNFGLSEDAKLQISKDTYEEDLDNLLAQIGDQYADLFLAAKNLSDAILLSDILTVSDENTKAPLSASMVKRYEEHQQDLALLKKLVKEQLPEKYKEIFSNKEKNGYAGYIDGKTSQEDFYKYIKPILSKLDGAEELLAKIDREDFLRKQRTFDNGSIPHQIHLNELHAILRRQEKYYPFLKENQEKIEKLLTFRIPYYVGPLAKGNSSFAWLKRRSDESITPWNFEEVVDQEASAQAFIERMTNFDTYLPEEKVLPKHSPLYEMFTVYNELTKVKYVTEGMTKPFLSAEQKEAIVDLLFKKNRKVTVKQLKENYFSKIECFDSVDITGVEDRFNASLGTYHDLLKIIKDKAFLDDEANQDILEDIVLTLTLFEDEKMIEKRLAKYADLFDKSVLKKLKKRHYTGWGRLSRKLINGIRDKQSGKTILDFLKADGFANRNFMQLINDSSLDFAKIIENAQEKAKSESLKETVANLAGSPAIKKGILQSIKIVDEIVKVMGHNPDNIVIEMARENQTTAQGIKNSRQRLKKLEEVHKKTGSKILKEHSVSNTQLQNDRLYLYLLQDGKDMYTGQDLDIDNLSQYDIDHIIPQSFIKDNSIDNIVLTSQEANRGKSDNVPSIEVVRKMKSYWQKQLKSGAISQRKFDHLTKAERGGLSESDKAGFIKRQLVETRQITKHVAQILDSRFNSKLDENNKSIRNVKIITLKSKMVSDFRKDFGLYKLREVNDYHHAHDAYLNAVVGTALLKKYPKLEAEFVYGDYKHYDDSSLGKATAKMFFYSNIMNFFKKEVKLADETGEIVWDKVKDFKTIRKVLSYPQVNIVKKTEVQTGGFSKESILPKGNSDKLIPRKNNWDPKKYGGFDSPTIAYSVLVVAKVAKGKAQKLKTVKELVGITIMEQSEFEKDPIAFLEKKGYQDIQENLIIKLPKYSLFELENGRRRLLASAKELQKGNELALPNKYVKFLYLASRYDKLTKSEDRHFVEQHLHYFDEILDIIVDFSNRYILADSNLEKIKSLYNEKDDFSINEQATNMLNLFTFTSLGAPAAFKFFDATIDRKRYTSTNEVLNSTLIHQSITGLYETRIDLSKLGGD

SEQ ID NO: 43 - protein, 1340 aa, Artificial Sequence
  1340 residue - marginal ancestral sequence reconstruction method - node 98
MRKPYSIGLDIGTNSVGWAVITDDYKVPAKKMKVLGNTDRQTIKKNLIGALLFDSGETAEATRLKRTARRRYTRRKNRIKYLQNIFSDEMSKVDSAFFQRLSESFLVPDDKEFDRHPIFGNLKDEVAYHKNYPTIYHLRKKLADSDQKADLRLIYLALAHIIKFRGHFLIEGDLDSENTDVHALFLKLVDTYNLLFEEDKIDTETIDAKAILTAKTSKSRRLENLIAEIPNQKKNTLFGNLISLSLGLTPNFKTNFELSEDAKLQISKDSYEEDLDNLLAQIGDQYADLFIAAKNLSDAILLSDILTVKGANTKAPLSASMVQRYEEHQQDLALLKKLVKEQLPEKYKEIFDNKEKNGYAGYIDGKTSQEDFYKYIKPILSKLDGAEKLISKLEREDFLRKQRTFDNGSIPHQIHLNELKAIIRRQEKYYPFLKENQEKIEKLFTFRIPYYVGPLANGNSSFAWLKRRSNESITPWNFEEVVDQEASARAFIERMTNFDTYLPEEKVLPKHSPLYEMFTVYNELTKVKYQTEGMKKPFLSSEEKEEIVNLLFKKERKVTVKQLKENYFSKIKCFDSVTISGVEDRFNASLGTYHDLLKIIKDKAFLDDEANQDILEDIVLTLTLFEDEKMIEKRLAKYADVFDKSVLKKLKKRHYTGWGRLSQKLINGIRDKQTGKTILDFLKDDGVANRNFMQLINDSSLDFAKIIKNAQEKTKSESLEETIANLAGSPAIKKGILQSIKIVDEIVKVMGHNPDNIVIEMARENQSTAQGIKNSRQRLRKLEEVHKNTGSKILKEHNVSNTQLQSDRLYLYLLQDGKDMYTGKDLDFDNLSQYDIDHIIPQSFIKDNSIDNIVLTSQESNRGKSDNVPSIEIVNKMKSYWQKQLKSGAISQRKFDHLTKAERGGLSEFDKAGFIKRQLVETRQITKHVAQILDSRFNSNLDENSKSNRNVKIITLKSKMVSDFRKDFGFYKLREVNDYHHAHDAYLNAVVGTALLKKYPKLEAEFVYGDYKHYDDSSLGKATAKMFFYSNIMNFFKKEVKLADETGEIVWDKVKDIKTIRKVLSYPQVNIVKKTEVQTGGFSKESILPKGDSDKLIPRKNNWDPKKYGGFDSPIIAYSVLVVAKVAKGKAQKLKTVKELVGITIMEQNEFEKDPIAFLEKKGYQDIQESLIIKLPKYSLFELENGRKRLLASAKELQKGNELALPNKYVKFLYLASRYTKFTKEEDRHFVESHLHYFDEIMDIIVDFSNRYILADSNLEKIQNLYNEKDNFSIEEQATNMLNLFTFTGLGAPAAFKFFNADIDRKRYTSTNEILNSTLIHQSITGLYETRIDLSKLGGD

SEQ ID NO: 44 - protein, 1340 aa, Artificial Sequence
  1340 residue - marginal ancestral sequence reconstruction method - node 99
MKKPYSIGLDIGTNSVGWAVITDDYKVPAKKMKVLGNTDKQSIKKNLLGALLFDSGETAEATRLKRTARRRYTRRRNRIRYLQEIFSEEMNKVDDSFFHRLDESFLVPEDKRGDRHPIFGNLAEEVAYHEQFPTIYHLRKHLADSTEKADLRLVYLALAHMIKFRGHFLIEGDLNAENTDVQKLFQDFVEVYDRTFEESHLSEQTVDVEEILTEKISKSRRLENLIKHFPNEKKNGLFGNLIALILGLQPNFKTNFDLSEDAKLQFSKDTYEEDLENLLGQIGDEYADLFLAAKNLYDAILLSGILTVTDNSTKAPLSASMIKRYEEHQKDLAQLKQFIKENLPDKYNEIFSDKSKNGYAGYIEGKTSQEDFYKYLKNILSKIDGSEYFLDKIDREDFLRKQRTFDNGSIPHQIHLQEMHAILRRQGEYYPFLKENQEKIEKILTFRIPYYVGPLARGNSRFAWLTRKSDEKITPWNFDEVVDKESSAEAFINRMTNYDLYLPDEKVLPKHSLLYETFTVYNELTKVKYVTEQGKTQFFDANMKQEIFDHLFKENRKVTKKKLLDYLEKEFEEFRIVDLTGLDKEFNASLGTYHDLLKILKDKDFLDDEENEEILEDIVLTLTLFEDREMIRKRLEKYSDLFTKEQLKKLERRHYTGWGRLSAKLINGIRDKQSGKTILDYLIDDGSSNRNFMQLINDDALSFKEEIQKAQVIGETDNLKQVVQDLAGSPAIKKGILQSLKIVDELVKVMGHNPENIVVEMARENQTTNRGRRNSQQRLKRLEDALKNLGSNILKEHPVDNQQLQNDRLFLYYLQNGKDMYTGEELDIDNLSQYDIDHIIPQAFIKDDSIDNRVLTSSAENRGKSDNVPSIEVVRKMKSFWQKLLNAGLISQRKFDNLTKAERGGLTEDDKAGFIKRQLVETRQITKHVAQILDARFNTERDENDKRIRNVKIITLKSNLVSQFRKEFELYKVREINDYHHAHDAYLNAVVGTALLKKYPKLEPEFVYGDYKKYNYRERGKATAKMFFYSNIMNFFKTEVKLADETGEIVWDKEKDFATVRKVLSYPQVNIVKKVEVQTGGFSKESILPKGNSDKLIPRKIYWDPKKYGGFDSPTVAYSVLVVADIEKGKAKKLKTVKELVGITIMERSAFEKNPVAFLEKKGYQNIQEDNIIKLPKYSLFELENGRRRLLASAKELQKGNEMVLPAHLVTLLYHAKRIDKSNEPEHLEYVEKHKNEFKELLDYISDFSEKYILADKNLEKIKELYDQNDDADINELASSFINLLTFTALGAPAAFKFFGKNIDRKRYTSTKEVLNATLIHQSITGLYETRIDLSKLGED

SEQ ID NO: 45 - protein, 1340 aa, Artificial Sequence
  1340 residue - marginal ancestral sequence reconstruction method - node 100
MKKPYSIGLDIGTNSVGWAVITDDYKVPAKKMKVLGNTDKQSIKKNLLGALLFDSGETAEATRLKRTARRRYTRRKNRLRYLQEIFAEEMNKVDDSFFHRLDESFLVPEDKRGDRHPIFGNIAEEVAYHQKFPTIYHLRKHLADSSEKADLRLVYLALAHMIKFRGHFLIEGDLNAENTDVQKLFADFVEVYDRTFEESHLSEITVDAEEILTEKVSKSRRLENLIKHYPTEKKNTLFGNLIALALGLQPNFKTNFQLSEDAKLQFSKDTYEEDLEELLGKIGDEYADLFTAAKNLYDAILLSGILTVNDNSTKAPLSASMIKRYEEHQKDLAQLKQFIKENVPDQYNDIFKDKSKNGYAGYIENGVKQEDFYKYLKGILSKINGSEYFLDKIDREDFLRKQRTFDNGSIPHQIHLQEMHAILRRQGEYYPFLKENQEKIEKILTFRIPYYVGPLARKGSRFAWASYKSDEKITPWNFDEVVDKEKSAEKFITRMTSNDLYLPEEKVLPKHSLLYETFTVYNELTKVKYVNEQGKAQFFDANMKQEIFDHVFKENRKVTKEKLLNYLNKEFEEFRIVDLTGLDKEFNASLGTYHDLKKILKDKSFLDDEANEEIIEDIVLTLTLFEDREMIRKRLEKYSDIFTKEQLKKLERRHYTGWGRLSYKLINGIRNKESGKTILDYLIDDGSANRNFMQLINDDALSFKEEIQKAQVIGEVDDLAQVVHDLAGSPAIKKGILQSVKIVDELVKVMGHNPENIVIEMARENQTTNRGRRNSQQRLKRLQDSLKNLGSNILKEKPVDNQQLQNDRLFLYYLQNGKDMYTGEELDIDNLSQYDIDHIIPQAFIKDDSIDNRVLTSSAENRGKSDNVPSIEVVRARKSFWVKLLKAGLISQRKFDNLTKAERGGLTEDDKAGFIKRQLVETRQITKHVAQILDARFNTERDENDKVIRNVKIITLKSNLVSQFRKEFELYKVREINDYHHAHDAYLNAVVGTALLKKYPKLAPEFVYGEYKKYNHRERGKATAKMFFYSNLMNFFKTEVKLADETGEIVWDKEKDFATVRKVLSYPQVNIVKKVEVQTGGFSKESILPKGDSDKLIPRKIYWDPKKYGGFDSPTVAYSVLVVADIEKGKAKKLKTVKELVGITIMERSAFEKNPVAFLEKKGYHNIQEDKIIKLPKYSLFELENGRRRLLASAKELQKGNEMVLPAHLVTLLYHAQRIDKSNEPEHLEYVEKHKNEFKELLDYISDFSEKYVLADKNLEKIKALYDQNDDADIEEIASSFINLLTFTALGAPAAFKFFGENIDRKRYTSTKECLNATLIHQSITGLYETRIDLSKLGED

SEQ ID NO: 46 - protein, 1340 aa, Artificial Sequence
  1340 residue - marginal ancestral sequence reconstruction method - node 101
MKKPYSIGLDIGTNSVGWAVITDDYKVPAKKMKVLGNTDKQSIKKNLLGALLFDSGETAEATRLKRTARRRYTRRKNRLRYLQEIFAEEMNKVDESFFQRLDESFLVDEDKRGDRHPIFGNIAEEVAYHQKFPTIYHLRKHLADSSEKADLRLVYLALAHMIKFRGHFLIEGDLNAENTDVQKLFADFVEVYDRTFEESHLSEITVDAASILTEKVSKSRRLENLIKHYPTEKKNTLFGNLIALALGLQPNFKTNFQLSEDAKLQFSKDTYEEDLEELLGKIGDEYADLFTSAKNLYDAILLSGILTVDDNSTKAPLSASMIKRYEEHQKDLEKLKEFIKVNAPDQYNDIFKDKSKNGYAGYIENGVKQDEFYKYLKGILSKINGSEYFLDKIDREDFLRKQRTFDNGSIPHQIHLQEMHAILRRQGEYYPFLKENQDKIEKILTFRIPYYVGPLARKGSRFAWAEYKSDEKITPWNFDEVVDKEKSAEKFITRMTLNDLYLPEEKVLPKHSLLYETFTVYNELTKVKYVNEQGKAKFFDANMKQEIFDHVFKENRKVTKEKLLNYLNKEFEEFRIVDLTGLDKEFNASLGTYHDLKKILKDKSFLDDKANEEIIEDIIQTLTLFEDREMIRQRLQKYSDIFTKEQLKKLERRHYTGWGRLSYKLINGIRNKENNKTILDYLIDDGSANRNFMQLINDDALSFKEEIQKAQVIGDVDDIANVVHDLPGSPAIKKGILQSVKIVDELVKVMGHNPENIVIEMARENQTTNRGRRNSQQRLKRLQDSLKNLGSNINKKKPVENQQLQNDRLFLYYIQNGKDMYTGEELDIDNLSQYDIDHIIPQAFIKDDSIDNRVLTSSAENRGKSDDVPSIEVVRARKSFWVKLLKAGLISQRKFDNLTKAERGGLTEDDKAGFIKRQLVETRQITKHVAQILDARFNTERDENDKVIRNVKIITLKSNLVSQFRKEFELYKVREINDYHHAHDAYLNAVVGTALLKKYPKLAPEFVYGEYKKYNHRERGKATAKYFFYSNLMNFFKTEVKLADETGEIVWNKQKDFEIVRKVLSYPQVNIVKKVEVQTGGFSKESILPKGDSDKLIPRKIYWDPKKYGGFDSPTVAYSVLVVADVEKGKAKKLKTVKELVGITIMERSAFEKNPVAFLEKKGYHNIQEDKIIKLPKYSLFELENGRRRLLASAKELQKGNEMVLPAHLVTLLYHAHRIDKSNEPEHLEYVEKHKNEFKELLDYISDFSEKYVLADKNLEKIKALYDQNDDASIEEIASSFINLLTFTALGAPAAFNFFGEKIDRKRYTSTKECLNATLIHQSITGLYETRIDLSKLGED

SEQ ID NO: 47 - protein, 1340 aa, Artificial Sequence
  1340 residue - marginal ancestral sequence reconstruction method - node 102
MNKPYSIGLDIGTNSVGWAVITDDYKVPAKKMKVLGNTDKQSIKKNLLGALLFDSGETAEATRLKRTARRRYTRRKNRLRYLQEIFAEEMNKVDESFFQRLDDSFLVDEDKRGERHPIFGNIAAEVKYHDEFPTIYHLRKHLADTSEKADLRLVYLALAHMIKFRGHFLIEGDLKAENTDVQALFKDFVEVYDKTIEESHLSEITVDALSILTEKVSKSRRLENLIAHYPTEKKNTLFGNLIALSLGLQPNFKTNFQLSEDAKLQFSKDTYEEDLEGLLGEVGDEYADLFASAKNLYDAILLSGILTVDDNSTKAPLSASMVKRYEEHQKDLKKLKDFIKVNAPDQYNAIFKDKNKKGYAGYIESGVKQDEFYKYLKGILLKINGSGDFLDKIDREDFLRKQRTFDNGSIPHQIHLQEMHAILRRQGEHYPFLKENQDKIEKILTFRIPYYVGPLARKGSRFAWAEYKADEKITPWNFDDILDKEKSAEKFITRMTLNDLYLPEEKVLPKHSLLYETFTVYNELTKVKYVNEQGEAKFFDANMKQEIFDHVFKENRKVTKDKLLNYLNKEFEEFRIVNLTGLDKEFNSSLGTYHDLRKILKDKSFLDDKANEQIIEDIIQTLTLFEDREMIRQRLQKYSDIFTKAQLKKLERRHYTGWGRLSYKLINGIRNKENKKTILDYLIDDGYANRNFMQLINDDALSFKEEIAKAQIIGDVDDIANVVHDLPGSPAIKKGILQSVKIVDELVKVMGHNPANIIIEMARENQTTDRGRRNSQQRLKLLQDSLKNLDNPVNIKNPVENQQLQNDRLFLYYIQNGKDMYTGETLDINNLSQYDIDHIIPQAFIKDDSLDNRVLTSSAENRGKSDDVPSIEVVRARKSFWMKLLKAGLISQRKFDNLTKAERGGLTEEDKAGFIKRQLVETRQITKHVAQILDARFNTEHDENKKVIRNVKIITLKSNLVSQFRKEFELYKVREINDYHHAHDAYLNAVVGTALLKKYPKLAPEFVYGEYKKYNYRERGKATAKYFFYSNLMNFFKKEVKLADEDGEIAWNKQKDFKIVRKVLSYPQVNIVKKTEVQTGGFSKESILPKGDSDKLIPRKSYWDPKKYGGFDSPTVAYSVLVVADVEKGKSKKLKTVQELVGITIMERSAFEKNPVAFLEKKGYRNIREDKIIKLPKYSLFELENGRRRLLASAKELQKGNELVIPQRFTTLLYHAHRIDKSNEPEHLEYVEKHKDEFKELLDYISDFSEKYVLADKNLEKIKALFAQNDDASIEEIATSFISLLTFTALGAPAAFNFFGEKIDRKRYTSTTECLNATLIHQSITGLYETRIDLSKLGED

SEQ ID NO: 48 - protein, 1340 aa, Artificial Sequence
  1340 residue - marginal ancestral sequence reconstruction method - node 103
MKKSYSIGLDIGTNSVGWAVITDDYKVPAKKMKVLGNTDKKYIKKNLLGALLFDSGETAEATRLKRTARRRYTRRKNRLRYLQEIFAEEMAKVDESFFQRLDESFLTDDDKTFDSHPIFGNKAEEDAYHQKFPTIYHLRKHLADSSEKADLRLVYLALAHMIKFRGHFLIEGELNAENTDVQKLFADFVGVYDRTFDDSHLSEITVDAASILTEKISKSRRLENLIKHYPTEKKNTLFGNLIALALGLQPNFKTNFKLSEDAKLQFSKDTYEEDLEELLGKIGDDYADLFTSAKNLYDAILLSGILTVDDNSTKAPLSASMIKRYVEHHEDLEKLKEFIKVNKSELYHDIFKDKTKNGYAGYIENGVKQDEFYKYLKGILSKINGSDYFLDKIEREDFLRKQRTFDNGSIPHQIHLQEMHAILRRQGDYYPFLKENQDKIEKILTFRIPYYVGPLARKDSRFAWAEYRSDEKITPWNFDEVVDKEKSAEKFITRMTLNDLYLPEEKVLPKHSHVYETFAVYNELTKIKYVNEQGKSSFFDANMKQEIFDHVFKENRKVTKEKLLNYLNKEFEEFRINDLIGLDKEFNASLGTYHDLKKILKDKSFLDDKTNEEIIEDIILTLTLFEDRDMIHERLQKYSDIFTKQQLKKLERRHYTGWGRLSYKLINGIRNKENNKTILDYLIDDGSANRNFMQLINDDALSFKQIIQEAQVVGDVDDIEAVVHDLPGSPAIKKGILQSVKIVDELVKVMGDNPDNIVIEMARENQTTNRGRSKSQQRLKRLQDSLKELGSNLNKKKPVENSHLQNDRLFLYYIQNGKDMYTGEELDIDHLSDYDIDHIIPQAFIKDDSIDNRVLTSSAKNRGKSDDVPSIEIVRARKSYWVKLYKSGLISKRKFDNLTKAERGGLTEADKAGFIKRQLVETRQITKHVAQILDARFNTERDENDKVIRDVKVITLKSNLVSQFRKEFKFYKVREINDYHHAHDAYLNAVVGTALLKKYPKLAPEFVYGEYKKYDHSEMGKATAKYFFYSNLMNFFKTEVKYADDTGEIVWNKQKDFEIVRKVLSYPQVNIVKKVEVQTGGFSKESILPKGDSDKLIPRKVYWDTKKYGGFDSPTVAYSVLVVADVEKGKAKKLKTVKELVGISIMERSFFEENPVAFLEKKGYHNVQEDKLIKLPKYSLFEFEGGRRRLLASATELQKGNEMVLPAHLVELLYHAHRIDNFNSTEHLKYVSEHKKEFEEVLSCVENFANLYVDVEKNLSKIRAAADSMDNFSIEEISNSFINLLTLTALGAPADFNFLGEKIPRKRYTSTKECLNATLIHQSITGLYETRIDLSKLGEE

SEQ ID NO: 49 - protein, 1340 aa, Artificial Sequence
  1340 residue - marginal ancestral sequence reconstruction method - node 104
MEKSYSIGLDIGTNSVGWAVITDDYKVPAKKMKVLGNTDKKYIKKNLLGALLFDSGETAEATRLKRTARRRYTRRKNRLRYLQEIFAKEMAKVDESFFQRLEESFLTDDDKTFDSHPIFGNKAEEDAYHQKFPTIYHLRKHLADSPEKADLRLVYLALAHMIKFRGHFLIEGELNAENTDVQKLFADFVGVYDRTFDDSHLSEITVDAASILTEKISKSRRLENLIKQYPTEKKNTLFGNLIALALGLQPNFKTNFKLSEDAKLQFSKDTYEEDLEELLGKIGDDYADLFTSAKNLYDAILLSGILTVDDNSTKAPLSASMIKRYVEHHEDLEKLKEFIKVNKLELYHDIFKDKTKNGYAGYIENGVKQDEFYKYLKSILSKINGSDYFLDKIEREDFLRKQRTFDNGSIPHQIHLQEMHAILRRQGDYYPFLKENQAKIEKILTFRIPYYVGPLARKDSRFAWAKYHSDEPITPWNFDEVVDKEKSAEKFITRMTLNDLYLPEEKVLPKHSHVYETFAVYNELTKIKYVNEQGKSFFFDANMKQEIFDHVFKENRKVTKAKLLSYLNNEFEEFRINDLIGLDKDFNASLGTYHDLKKILKDKSFLDDKTNEQIIEDIVLTLTLFEDRDMIHERLQKYSDIFTSQQLKKLERRHYTGWGRLSYKLINGIRNKENNKTILDFLIDDGHANRNFMQLINDDSLSFKTIIQEAQVVGDVDDIEAVVHDLPGSPAIKKGILQSVKIVDELVKVMGDNPDNIVIEMARENQTTGYGRNKSNQRLKRLQDSLKEFGSDLSKKKPVENSHLQNDRLFLYYIQNGKDMYTGEELDIDHLSDYDIDHIIPQAFIKDNSIDNRVLTSSAKNRGKSDDVPSIEIVRNRKSYWYKLYKSGLISKRKFDNLTKAERGGLTEADKAGFIKRQLVETRQITKHVAQILDARFNTKRDENDKVIRDVKVITLKSNLVSQFRKEFKFYKVREINDYHHAHDAYLNAVVGTALLKKYPKLAPEFVYGEYKKYDHSEMGKATAKYFFYSNLMNFFKTEVKYADADGEVVWNKQKDFDIVRKVLSYPQVNIVKKVEVQTGGFSKESILPKGDSDKLIPRKVYWDTKKYGGFDSPTVAYSVLVVADVEKGKAKKLKTVKELVGISIMERSFFEENPVSFLEKKGYHNVQEDKLIKLPKYSLFEFEGGRRRLLASATELQKGNEVVLPAHLVELLYHAHRIDNFNSTEHLKYVSEHKKEFEEVLSCVENFANLYVDVEKNLSKIRAAAESMDNFSIEEISASFINLLTLTALGAPADFNFLGEKIPRKRYTSTKECLSATLIHQSVTGLYETRIDLSKLGEE

SEQ ID NO: 50 - protein, 1340 aa, Artificial Sequence
  1340 residue - marginal ancestral sequence reconstruction method - node 105
TKKNYSIGLDIGTNSVGWAVITDDYKVPAKKMKVLGNTDKKYIKKNLLGALLFDSGETAEATRLKRTARRRYTRRKNRLRYLQEIFAEEMAKVDESFFQRLDESFLTDDDKTFDSHPIFGNKAEEDAYHQKFPTIYHLRKHLADSSEKADLRLVYLALAHMIKFRGHFLIEGELNAENTDVQKLFADFVGVYDRTFDDSHLSEITVDAASILTEKISKSRRLENLIKHYPTEKKNTLFGNLIALALGLQPNFKTNFKLSEDAKLQFSKDTYEEDLEELLGKIGDDYADLFTSAKNLYDAILLSGILTVDDNSTKAPLSASMIKRYVEHHEDLEKLKEFIKANKSELYHDIFKDKTKNGYAGYIENGVKQDEFYKYLKGILSKINGSDYFLDKIEREDFLRKQRTFDNGSIPHQIHLQEMHAILRRQGDYYPFLKENQDKIEKILTFRIPYYVGPLARKDSRFAWAEYRSDEKITPWNFDKVIDKEKSAEKFITRMTLNDLYLPEEKVLPKHSHVYETFAVYNELTKIKYVNEQGKDSFFDSNMKQEIFDHVFKENRKVTKEKLLNYLNKEFPEYRIKDLIGLDKEFNASLGTYHDLKKILKDKSFLDDKVNEEVIEDIIKTLTLFEDRDMIHERLQKYSDIFTKQQLKKLERRHYTGWGRLSYKLINGIRNKENNKTILDYLIDDGSANRNFMQLINDDALSFKQIIQEAQVVGDVDDIEAVVHDLPGSPAIKKGILQSVKIVDELVKVMGDNPDNIVIEMARENQTTNRGRSQSQQRLKKLQNSLKELGSNLNEEKPVENSHLQNDQLFLYYIQNGKDMYTGDELDIDHLSDYDIDHIIPQAFIKDDSIDNRVLTSSAKNRGKSDDVPSLDIVRARKAEWVRLYKSGLISKRKFDNLTKAERGGLTEADKAGFIKRQLVETRQITKHVAQILDARFNTERDENDKVIRDVKVITLKSNLVSQFRKEFKFYKVREINDYHHAHDAYLNAVVGTALLKKYPKLAPEFVYGEYKKYDHSEMGKATAKYFFYSNLMNFFKTVVKYADDTGEIAWNKQTDFEKVRKVLSYPQVNIVKKVETQTGGFSKESILPKGDSDKLIPRKVYWDTKKYGGFDSPTVAYSVLVVADVEKGKAKKLKTVKELVGISIMERSFFEENPVEFLENKGYHNVQEDKLIKLPKYSLFEFEGGRRRLLASATELQKGNEMVLPAHLVELLYHAHRIDNFNSTEHLKYVSEHKKEFEEVLSCVENFANLYVDVEKNLSKIRAAADSMDNFSIEEISNSFINLLTLTALGAPADFNFLGEKIPRKRYTSTKECLNATLIHQSITGLYETRIDLSKLGEE

SEQ ID NO: 51 - protein, 1340 aa, Artificial Sequence
  1340 residue - marginal ancestral sequence reconstruction method - node 106
TKKNYSIGLDIGTNSVGWAVITDDYKVPAKKMKVLGNTDKKYIKKNLLGALLFDSGETAEATRLKRTARRRYTRRKNRLRYLQEIFAEEMAKVDESFFQRLDESFLTDDDKTFDSHPIFGNKAEEDAYHQKFPTIYHLRKHLADSSEKADLRLVYLALAHMIKFRGHFLIEGELNAENTDVQKIFADFVGVYDRTFDDSHLSEITVDAASILTEKISKSRRLENLIKYYPTEKKNTLFGNLIALALGLQPNFKTNFKLSEDAKLQFSKDTYEEDLEELLGKIGDDYADLFTSAKNLYDAILLSGILTVDDNSTKAPLSASMIKRYVEHHEDLEKLKEFIKANKSELYHDIFKDKTKNGYAGYIENGVKQDEFYKYLKNILSKIDGSDYFLDKIEREDFLRKQRTFDNGSIPHQIHLQEMHAILRRQGDYYPFLKENQDRIEKILTFRIPYYVGPLARKDSRFAWAEYRSDEKITPWNFDKVIDKEKSAEKFITRMTLNDLYLPEEKVLPKHSHVYETYAVYNELTKIKYVNEQGKDSFFDSNMKQEIFDHVFKENRKVTKEKLLNYLNKEFPEYRIKDLIGLDKEFNASLGTYHDLKKILKDKAFLDDKVNEEVIEDIIKTLTLFEDKDMIHERLQKYSDIFTANQLKKLERRHYTGWGRLSYKLINGIRNKENNKTILDYLIDDGSANRNFMQLINDDTLPFKQIIQKSQVVGDVDDIEAVVHDLPGSPAIKKGILQSVKIVDELVKVMGDNPDNIVIEMARENQTTNRGRSQSQQRLKKLQNSLKELGSNLNEEKPVENSHLQNDQLFLYYIQNGKDMYTGDELDIDHLSDYDIDHIIPQAFIKDDSIDNRVLTSSAKNRGKSDDVPSLDIVRARKAEWVRLYKSGLISKRKFDNLTKAERGGLTEADKAGFIKRQLVETRQITKHVAQILDARFNTERDENDKVIRDVKVITLKSNLVSQFRKDFEFYKVREINDYHHAHDAYLNAVVGTALLKKYPKLASEFVYGEYKKYDHSEMGKATAKYFFYSNLMNFFKTVVKYADDTGEIAWNKQTDFEKVRKVLSYPQVNIVKKVETQTGGFSKESILPKGDSDKLIPRKVYWDTKKYGGFDSPTVAYSVFVVADVEKGKAKKLKTVKELVGISIMERSFFEENPVEFLENKGYHNIREDKLIKLPKYSLFEFEGGRRRLLASASELQKGNEMVLPGHLVELLYHAHRIDNFNSTEYLNYVSEHKKEFEKVLSCVEDFANLYVDVEKNLSKIRAVADSMDNFSIEEISNSFINLLTLTALGAPADFNFLGEKIPRKRYTSTKECLNATLIHQSITGLYETRIDLSKLGEE

SEQ ID NO: 52 - protein, 1340 aa, Artificial Sequence
  1340 residue - marginal ancestral sequence reconstruction method - node 107
MKKPYSIGLDIGTNSVGWAVITDDYKVPAKKMKVLGNTDKQYIKKNLLGALLFDSGNTAEDRRLKRTARRRYTRRRNRILYLQEIFSEEMNKVDDSFFHRLDDSFLVPEDKRGDRHPIFGNLAEEVAYHEQFPTIYHLRKHLADSTEKADLRLVYLALAHMIKFRGHFLIEGDLNAENTDVQKLFQDFVEVYDRTFEDSHLSEQNVDVEEILTEKISKSRRLERLLKHFPNEKKNGLFGNFIALILGLQPNFKTNFDLSEDAKLQFSKDTYEEDLENLLGQIGDEYADLFLAAKKLYDAILLSGILTVTDSSTKAPLSASMIQRYEEHQKDLAQLKQFIKQNLPDKYNEVFSDKSKDGYAGYIEGKTNQEDFYKYLKNLLSKIEGSEYFLDKIDREDFLRKQRTFDNGSIPHQIHLQEMHAILRRQGEYYPFLKENQEKIEKILTFRIPYYVGPLARGNSDFAWLTRKSDEKITPWNFDEVVDKESSAEAFINRMTNYDLYLPDEKVLPKHSLLYEKFTVYNELTKVKYVTEQGKTYFFDANMKQEIFDHLFKENRKVTKKKLLDYLEKEFDEFRIVDLTGLDKEFNASLGTYHDLLKILKDKDFLDDEENEEILEDIVLTLTLFEDREMIRKRLEKYSDLFTKEQLKKLERRHYTGWGRLSAKLINGIRDKQSGKTILDYLIDDGSSNRNFMQLINDDALSFKEEIQKAQVIGETDNLKQVVQDLAGSPAIKKGILQSLKIVDELVKVMGHNPENIVVEMARENQTTNQGRRNSQQRLKRLEDALKNLGSNILKEHPVDNQQLQNDRLFLYYLQNGKDMYTGEELDIDNLSQYDIDHIIPQAFIKDDSIDNRVLTSSAENRGKSDNVPSIEVVRKMKSFWQKLLNAKLISQRKFDNLTKAERGGLTEDDKAGFIKRQLVETRQITKHVARILDARFNTELDENNKRIRNVKIITLKSNLVSQFRKEFELYKVREINDYHHAHDAYLNAVVATALLKKYPQLEPEFVYGDYPKYNYRERKKATAKMFFYSNIMNFFKTEVKLADETGEIVWDKEKDFATVRKVLSYPQVNIVKKVEEQTGGFSKESILPKGNSDKLIPRKIYWDPKKYGGFDSPTVAYSVLVVADIEKGKAKKLKTVKELVGITIMERSAFEKNPVAFLEKKGYQNIQEDNIIKLPKYSLFELENGRRRLLASAKELQKGNEMVLPAHLVTLLYHAKRIHKVNEPEHLEYVEKHKNEFKELLDYISDFSEKYILADNNLEKIKELYDQNDDADINELASSFINLLTFTALGAPAAFKFFGKNIDRKRYTSTTEILNATLIHQSITGLYETRIDLSKLGED

SEQ ID NO: 53 - protein, 1340 aa, Artificial Sequence
  1340 residue - marginal ancestral sequence reconstruction method - node 108
MKKPYSIGLDIGTNSVGWAVITDDYKVPAKKMKVLGNTDKQYIKKNLLGALLFDSGNTAEDRRLKRTARRRYTRRRNRILYLQEIFSEEMNKVDDSFFHRLDDSFLVPEDKRGDRHPIFGNLAEEVAYHEQFPTIYHLRKHLADSTEKADLRLVYLALAHMIKFRGHFLIEGDLNAENTDVQKLFQEFVEVYDRTFEDSHLSEQNVDVEEILTEKISKSRRLERLLKHFPNEKKNGLFGNFIALILGLQPNFKTNFDLSEDAKLQFSKDTYEEDLENLLGQIGDEYADLFLAAKKLYDSILLSGILTVTDLSTKAPLSASMIQRYDEHQKDLAQLKQFIKQNLPDKYNEVFSDASKDGYAGYIEGKTNQEDFYKYLKNLLSKIEGSEYFLDKIDREDFLRKQRTFDNGSIPHQIHLQEMRAILRRQGEYYPFLKENQEKIEKILTFRIPYYVGPLARGNSDFAWLSRKSDEKITPWNFDEVVDKESSAEAFINRMTNYDLYLPDEKVLPKHSLLYEKFTVYNELTKVKYVTEQGKTYFFDANMKQEIFDGLFKENRKVTKKKLLDFLEKEFDEFRIVDLTGLDKEFNASLGTYHDLLKILKDKDFLDDSENEEILEDIVLTLTLFEDREMIRKRLEKYSDLFTKEQLKKLERRHYTGWGRLSAKLINGIRDKQSRKTILDYLIDDGSSNRNFMQLINDDALSFKEEIAKAQVIGETDNLKQVVQDLAGSPAIKKGILQSLKIVDELVKVMGHEPENIVVEMARENQTTNQGRRNSQQRLKRLEDAIKNLGSNILKEHPVDNQQLQNDRLFLYYLQNGRDMYTGEELDIDNLSQYDIDHIIPQAFIKDNSIDNRVLTSSAENRGKSDNVPSIDVVRKMKSFWSKLLNAKLISQRKFDNLTKAERGGLTDDDKAGFIKRQLVETRQITKHVARILDERFNTELDENNKRIRKVKIVTLKSNLVSNFRKEFELYKVREINDYHHAHDAYLNAVVAKALLKKYPQLEPEFVYGDYPKYNYRERKKATAKMFFYSNIMNFFKTEVKLADETGEIVWDKEKHFATVRKVLSYPQVNIVKKVEEQTGGFSKESILPKGNSDKLIPRKIYWDPKKYGGFDSPTVAYSVLVVADIEKGKAKKLKTVKELVGITIMERSAFEKNPVAFLERKGYQNIQEDNIIKLPKYSLFELENGRRRLLASAKELQKGNEMVLPAHLVTLLYHAKRIHKVNEPEHLEYVEKHKNEFKELLDYISDFSEKYILADKNLEKIKELYDQNDDADINELASSFINLLTFTALGAPAAFKFFDKNIDRKRYTSTTEILNATLIHQSITGLYETRIDLSKLGED

SEQ ID NO: 54 - protein, 1340 aa, Artificial Sequence
  1340 residue - marginal ancestral sequence reconstruction method - node 109
MKKPYSIGLDIGTNSVGWAVVTDDYKVPAKKMKVLGNTDKSHIKKNLLGALLFDSGNTAEDRRLKRTARRRYTRRRNRILYLQEIFSEEMGKVDDSFFHRLDDSFLVTEDKRGDRHPIFGNLAEEVAYHEKFPTIYHLRKHLADSTEKADLRLVYLALAHMIKFRGHFLIEGELNAENTDVQKLFQEFVGVYDRTFEDSHLSEQNVDVEEILTEKISKSRRLERLLKHFPNEKKNGLFGNFIALILGLQPNFKTNFELSEDAKLQFSKDTYEEELEVLLAQIGDNYAELFLSAKKLYDSILLSGILTVTDVSTKAPLSASMIQRYNEHQMDLAQLKQFIRQKLSDKYNEVFSDVSKDGYAGYIDGKTNQEAFYKYLKGLLNKIEGSGYFLDKIEREDFLRKQRTFDNGSIPHQIHLQEMRAIIRRQAEFYPFLADNQDRIEKILTFRIPYYVGPLARGKSDFAWLSRKSADKITPWNFDEIVDKESSAEAFINRMTNYDLYLPNQKVLPKHSLLYEKFTVYNELTKVKYKTEQGKTAFFDANMKQEIFDGVFKVYRKVTKDKLMDFLEKEFDEFRIVDLTGLDKEFNASYGTYHDLRKILKDKDFLDNSKNEKILEDIVLTLTLFEDREMIRKRLENYSDLLTKEQLKKLERRHYTGWGRLSAELIHGIRNKESRKTILDYLIDDGNSNRNFMQLINDDALSFKEEIAKAQVIGETDNLNQVVSDIAGSPAIKKGILQSLKIVDELVKIMGHQPENIVVEMARENQFTNQGRRNSQQRLKGLTDSIKEFGSQILKEHPVENSQLQNDRLFLYYLQNGRDMYTGEELDIDYLSQYDIDHIIPQAFIKDNSIDNRVLTSSKENRGKSDDVPSKDVVRKMKSYWSKLLSAKLITQRKFDNLTKAERGGLTDDDKAGFIKRQLVETRQITKHVARILDERFNTETDENNKKIRQVKIVTLKSNLVSNFRKEFELYKVREINDYHHAHDAYLNAVIGKALLGVYPQLEPEFVYGDYPHFHGHKENKATAKKFFYSNIMNFFKKDDVRTDKNGEIIWKKDEHISNIKKVLSYPQVNIVKKVEEQTGGFSKESILPKGNSDKLIPRKFYWDTKKYGGFDSPIVAYSILVIADIEKGKSKKLKTVKDLVGITIMERTTFEKNPVAFLERKGYRNVQEENIIKLPKYSLFELENGRRRLLASARELQKGNEIVLPNHLGTLLYHAKNIHKVDEPKHLDYVEKHKDEFKELLDVVSNFSKKYILAESNLEKIKELYAQNNNEDIKELASSFINLLTFTAIGAPAAFKFFDKNIDRKRYTSTTEILNATLIHQSITGLYETRIDLSKLGGD

SEQ ID NO: 55 - protein, 1340 aa, Artificial Sequence
  1340 residue - marginal ancestral sequence reconstruction method - node 110
MKKPYSIGLDIGTNSVGWAVITDDYKVPAKKMKVLGNTDKEYIKKNLLGALLFDSGNTAEDRRLKRTARRRYTRRRNRILYLQEIFSEEMNKVDDSFFHRLDDSFLVAEDKRGDRHPIFGNLAEEVKYHEQFPTIYHLRKHLADSSEKADLRLVYLALAHMIKFRGHFLIEDDLDVRNTDVQKLFQEFLEVYDTTFEDSHLSEQNIDVEEILTEKISKSRKLERLLAQFPNQKKNGLFGNFLALIVGLQPNFKTNFDLSEDAKLQFSKDSYDEDLENLLGQIGDEYADLFVAAKKLYDSILLSGILTVTDLSTKAPLSASMIQRYDEHQKDLAQLKQFIKANLPDKYKEVFSDASKDGYAGYIEGKTNQEDFYKYLKNLLSKIEGSEYFLEKIDREDFLRKQRTFDNGSIPHQVHLAEMKAILRRQGEYYPFLKENQEKIEKILTFRIPYYVGPLARGNSDFAWLSRKSDEKITPWNFDEVVDKESSAEAFINRMTNNDLYLPDEKVLPKHSLLYEKFTVYNELTKVKYVTEQGETYFFDANMKQEIFDGLFKENRKVTKKKLLDFLEKEFDEFRIVDITGLDKEFNASLGTYHDLLKILKDKDFLDDSENEDILEDIVLTLTLFEDREMIKKRLEKYSDLFTKKQLKKLERRHYTGWGRLSAKLINGIRDKQSRKTILDYLIDDGRSNRNFMQLINDDALSFKEEIAKAQVIGDSDNLHQVVQDLAGSPAIKKGILQSLKIVDELVKVMGYEPEQIVVEMARENQTTNQGRRNSQQRLKRLEEAIKNLGSDILKEHPVDNQQLQNDRLFLYYLQNGRDMYTGETLDIDNLSQYDIDHIIPQAFIKDNSIDNRVLVSSAKNRGKSDNVPSIDVVKKMKSFWSKLLNAKLISQRKFDNLTKAERGGLTDDDKAGFIKRQLVETRQITKHVARILDERFNTELDENNKRIRKVKIVTLKSNLVSNFRKEFEFYKVREINDYHHAHDAYLNAVVAKALLTKYPQLEPEFVYGDYPKYNYRERKSATEKMFFYSNIMNFFKTKVKLADETGEIVWDKEKHFATVRKVLSYPQVNIVKKVEEQTGGFSKESILPKGNSDKLIPRKIYLDPKKYGGFDSPTVAYSVLVVADIEKGKAKKLKTVKELVGITIMERSRFEKNPVAFLERKGYQNIQEDKIIKLPKYSLFELENGRRRLLASAKELQKGNEMVLPAHLVKLLYHAKRINKVNEPEHIEYVEKHRNEFKDLLNYISDFSEKYILADKNLEKIKELYEQNEDDSVNELASSFINLLTFTALGAPAAFKFFDKNIDRKRYTSTTEVLNATLIHQSITGLYETRIDLSKLGED

SEQ ID NO: 56 - protein, 1340 aa, Artificial Sequence
  1340 residue - marginal ancestral sequence reconstruction method - node 111
MKKPYSIGLDIGTNSVGWAVITDDYKVPAKKMKVLGNTDKEYIKKNLLGALLFDSGNTAEDRRLKRTARRRYTRRRNRILYLQEIFSEEMNKVDESFFHRLDDSFLVAEDKRGDRHPIFGNIADEVKYHEQFPTIYHLRKHLADSSEKADLRLVYLALAHMIKFRGHFLIDDPLDVRNTDSQKLFQEFLEAYDSTQEDSHLSEQKIDISDIITEKISKSRKVEALLAQFPNQKKNSFFGNLVSLVFGLMPNFKTNFDLSEDAKLQFSKDSYDEDLENLLGQIGDEYADVFVAAKKLYDSILLSGILTVNDLSTKAPLSASMIQRYDEHNKDLAQLKDFIKANLPDVFKEVFSDASKNGYAGYIEGKTSQEDFYKYLKNLLGKVDGSEYFIEKIDREDFLRKQRTFDNGSIPHQVHLAEMKAILRRQGEYYPFLKENAEKIQQILTFRIPYYVGPLARGNSDFAWASFNSDEKITPWNFDEVIDKNSSAQAFIERMTNNDLYLPDEKVLPKHSLLYEKFTVYNELTKVKYVTETGEARFFDANLKQEIFDGLFKKNRKVTKKKLLDFLEKNFDEFRIVDITGLDKEFNASYGTYHDLLKILKDKEFMDDSENEDILEDIVLTLTLFEDREMIKQRLAKYADLFDKKVIDKLARRHYTGWGRLSAKLINGIRDKQSRKTILDYLIDDGRSNRNFMQLINDDNLSFKDEIAKAQVIGDSDDLHQVVQDLAGSPAIKKGILQSLKIVDELVKVMGYEPEQIVVEMARENQTTARGRRNSQQRLKRLEEAIKNLGSDILKEHPVDNQQLQNDRLFLYYLQNGRDMYTGETLDIDNLSQYDIDHIIPQAFIKDNSIDNRVLVSSAKNRGKSDNVPSEDVVKRMKSFWSKLLNAKLISQRKFDNLTKAERGGLTDDDKAGFIKRQLVETRQITKHVARILDERFNREFDENNKRIRKVKIVTLKSNLVSNFRKEFEFYKVREINDYHHAHDAYLNAVVAKALLTKYPKLEPEFVYGEYPKYNYRERKSATEKMFFYSNIMNMFKTKVKLADETGEIAWDKTKHFATVKKVLSYPQVNIVKKVEEQTGGFSKESILPKGNSDKLIARKNYLDTQKYGGFDSPTVAYSVLVVADIEKGKAKKLKTVKELIGITIMERSRFENNSVAFLERKGYQNIQENKIIKLPKYSLFELENGRRRLLASAKELQKGNEMVLPAHLVKLLYHAKHINSVNEPEHINYVEKHRNEFKDLLNYIRDFSEKYILADKNLEKINELFEENEEDSVSELASSFINLLTFTALGAPAAFKFFDKNIDRKRYTSTTEVLSATLIHQSITGLYETRIDLSKLGED

SEQ ID NO: 57 - protein, 1340 aa, Artificial Sequence
  1340 residue - marginal ancestral sequence reconstruction method - node 112
MKKPYSIGLDIGTNSVGWAVITDDYKVPAKKMKVLGNTDKEYIKKNLLGALLFDSGETAEATRMKRTARRRYTRRRNRILYLQEIFSEEMNKVDESFFHRLDDSFLVAEDKRGERHPIFGNIADEVKYHEEFPTIYHLRKHLADSSEKADLRLVYLALAHIIKYRGHFLIDEPIDIRNTDSQKLFQEFLDAYDSIQEDSHLSEEKTDISDIITAKISKSRKVEALLAQFPNQKKNSFFGNLVSLVFGLMPNFKSNFDLSEDAKLQFSKDSYDEDLENLLGMIGDEYADVFVAAKKLYDSILLSGILTTNDLSTKAPLSASMIERYDEHNKDKQLLKDFIRANIGDVFKEVFYDTSKNGYAGYIEGKTSQEDFYKYLKNLLGKVDGSEYFIEKIDREDFLRKQRTFDNGSIPHQVHLAEMKAILRRQGEFYPFLKENAEKIQQILTFRIPYYVGPLARGNSRFAWASFNSNEKITPWNFDDVIDKSSSAQAFIERMTNNDLYLPDEKVLPKHSLLYEKFTVYNELTKVKYVTETGEARFFDANLKKEIFDGLFKKNRKVTKKKLLDFLEKNFDEFRIVDITGLDNEFNASYGTYHDLLKILKDKEFMDDSENEDILEDIVLTLTLFEDREMIKQRLLKYEDLFDKKVIDKLSRRHYTGWGRLSAKLINGIKDKQSRKTILDYLIDDGHSNRNFMQLINDDNLSFKDEIAKAQVIGDGDDLHQVVQELAGSPAIKKGILQSLKIVDELVKVMGYDPEQIVVEMARENQTTARGRRNSQQRLGRLKEAIQDLGSDILKEHPVENNQLQNDRLYLYYLQNGRDMYTGETLDIDNLSQYDIDHIIPQAFIKDNSLDNRVLVSSAKNRGKSDNVPSNDVVKRMKSFWSKLLNAKLISQRKFDNLTKAERGGLSADDKAGFIKRQLVETRQITKHVARILDERFNREFDENNKRIRKVKIVTLKSNLVSNFRKEFEFYKVREINNYHHAHDAYLNAVVAKALLTRYPKLEPEFVYGEYPKYNYRERKSATEKMFFYSNIMNMFKTTIKLADETGEIAWDKTKHFATVKKVLSYPQVNIVKKVEEQTGGFSKESILPKGNSDKLIARKNYLNTQKYGGFDSPTVAYSVLFVADIEKGKSKKLKTVKEMIGITIMERSRFESNSVAFLEEKGYQNIRENTIIKLPKYSLFELENGRRRLLASAKELQKGNEMVLPQHLVKLLYHAKHINSLNKPEHINYVEKHRNEFTDLLHHIKDFSEKNILAAKNLEKINEAFEENEEDSVSELAQSFISLLTFTALGAPAAFKFFDKNIDRKRYTSTTEVLSATLIHQSITGLYETRIDLSKLGEE

SEQ ID NO: 58 - protein, 1340 aa, Artificial Sequence
  1340 residue - marginal ancestral sequence reconstruction method - node 113
MKKPYSIGLDIGTNSVGWAVITDDYKVPSKKMKVLGNTDKRYIKKNLLGALLFDSGNTAEDRRLKRTARRRYTRRRNRILYLQEIFSEEMNKVDDSFFHRLDDSFLVPEDKRGSKHPIFGTLAEEKAYHKQFPTIYHLRKHLADSTEKADLRLVYLALAHMIKYRGHFLIEGDLNSENNDVQKLFNDFVEVYDKTFEGSHLSEQNADVEEILTEKISKSRRLERILKHFPNEKKNGLFGNFLALILGLQPNFKTNFDLAEDAKLQFSKDTYEEDLENLLGQIGDDYADLFLAAKKLYDAILLSGILTVTDSSTKAPLSASMIKRYEEHQKDLALLKQFIKQNLPDKYNEVFSDKSKDGYAGYIEGKTTQEDFYKYIKNLLSKIEGSDYFLDKIDREDFLRKQRTFDNGSIPHQIHLQEMHAILRRQGEYYPFLKENQEKIEKILTFRIPYYVGPLARGNSDFAWLTRKSDEKITPWNFDEVVDKESSAEAFINRMTNYDLYLPDEKVLPKHSLLYETFAVYNELTKVKFIAEGMRDYFLDSGQKKEIVNQLFKEKRKVTEKDIIDYLENEFDEYDGVELKGLEKQFNASLSTYHDLLKILKDKEFLDDEENEEILEDIVLTLTLFEDREMIRKRLEKYSDIFTEEQLKKLERRHYTGWGRLSAKLINGIRDKQTGKTILDYLIDDGTSNRNFMQLINDDALSFKEEIQKAQVIGETDDLKQVVQDLAGSPAIKKGILQSLKIVDELVKVMGHNPENIVVEMARENQTTNQGRRNSQQRYKRLEDALKNLGSNILKEHPTDNQQLQNDRLFLYYLQNGKDMYTGEELDIDQLSQYDIDHIIPQAFIKDDSIDNRVLTSSAENRGKSDNVPSIEVVRKRKSFWQQLLDSKLISQRKFDNLTKAERGGLTEEDKAGFIKRQLVETRQITKHVARILDARFNTELDENDKRIRNVKIITLKSNLVSQFRKEFELYKVREINDYHHAHDAYLNAVVATALLKKYPQLEPEFVYGDYPKYNYRERKKATEKVFFYSNIMNFFKKEVKYADETGEIVWDKEKDFATVRKVLSYPQVNIVKKVEEQTGGFSKESILPKGNSDKLIPRKIYLDPKKYGGFDSPTIAYSVLVIADIEKGKAKKLKTVKELVGITIMERTAFEKNPIAFLEKKGYKNIQEDNIIKLPKYSLFELENGRRRLLASAKELQKGNEMVLPAHLVTLLYHAKRIHKINEPIHLEYVEKHKNEFKELLNYISDFSEKYILADNNLEKIKELYDQNDDADINELASSFINLLTFTALGAPAAFKFLGKNIDRKRYTSTTEILNATLIHQSITGLYETRIDLSKLGED

SEQ ID NO: 59 - protein, 1340 aa, Artificial Sequence
  1340 residue - marginal ancestral sequence reconstruction method - node 114
MKKPYSIGLDIGTNSVGWAVITDDYKVPSKKMKVLGNTDKRYIKKNLLGALLFDSGTTAEDRRLKRTARRRYTRRRNRILYLQEIFSEEMSKVDDSFFHRLDDSFLVPEDKRGSKYPIFGTLAEEKAYHKQFPTIYHLRKHLADSTEKADLRLVYLALAHMIKYRGHFLIEGDFNSKNNDIQKIFNDFVEIYDNTFEGSHLSEQNAQVEEILTDKISKSAKRERILKLFPDEKNNGLFSEFLKLIVGNQADFKKHFDLEEKAPLQFSKDTYDEDLENLLGQIGDDYADLFLAAKKLYDAILLSGILTVTDSSTKAPLSASMIKRYEEHQKDLALLKQFIKNNLPEKYNEVFSDKSKDGYAGYIDGKTTQEDFYKYIKNLLSKFEGADYFLDKIDREDFLRKQRTFDNGSIPHQIHLQEMHAILRRQGEYYPFLKENKEKIEKILTFRIPYYVGPLARGNSDFAWLTRKSDEKITPWNFEEVVDKESSAEAFINRMTNYDLYLPEEKVLPKHSLLYETFAVYNELTKVKFIAEGMRDYFLDSGQKKEIVNQLFKEKRKVTEKDIIDYLHNEVDGYDGIELKGIEKQFNASLSTYHDLLKIIKDKEFLDDAENEAILEDIVHTLTIFEDREMIKQRLAKYDNLFDEKVLKKLTRRHYTGWGKLSAKLINGIRDKQTGNTILDYLIDDGTSNRNFMQLINDDALSFKEEIQKAQVIGETDDVKQVVQDLPGSPAIKKGILQSIKIVDELVKVMGHNPESIVVEMARENQTTNQGKRNSQQRYKRIEDALKNLGSNILKENPTDNNQLQNDRLFLYYLQNGKDMYTGEELDIDQLSSYDIDHIIPQAFIKDDSIDNRVLTSSADNRGKSDNVPSIEVVQKRKSFWQQLLDSKLISQRKFDNLTKAERGGLTEEDKAGFIKRQLVETRQITKHVARILDARFNTELDENDKKIRTVKIITLKSNLVSQFRKEFELYKVREINDYHHAHDAYLNAVVATALLKKYPKLEPEFVYGDYPKYNYRERKKATEKVFFYSNIMNFFKKEVHYADETGEIVWNKEKDFATVRKVLSYPQVNIVKKVEEQTGGFSKESILPKGNSDKLIPRKIYLDPKKYGGFDSPTIAYSVLVIADIEKGKAKKLKTVKELVGITIMERTAFEKNPITFLEEKGYKNIQEENIIKLPKYSLFELENGRRRLLASAKELQKGNEIVLPAHLVTLLYHAKRIHKINEPIHLEYVEKHKNEFKELLNYISEFSEKYILADNNLEKIKSLYDQNEDADIDELASSFINLLTFTALGAPAAFKFLGVNIDRKRYTSTSEILNATLIHQSITGLYETRIDLSKLGED

SEQ ID NO: 60 - protein, 1340 aa, Artificial Sequence
  1340 residue - marginal ancestral sequence reconstruction method - node 115
MTKPYSIGLDIGTNSVGWAVITDDYKVPSKKMKVLGNTSKKYIKKNLLGALLFDSGITAEGRRLKRTARRRYTRRRNRILYLQEIFSTEMATLDDAFFQRLDDSFLVPDDKRDSKYPIFGNLVEEKAYHDEFPTIYHLRKYLADSTKKADLRLVYLALAHMIKYRGHFLIEGEFNSKNNDIQKNFQDFLDTYNAIFESDLSLENSKQLEEIVKDKISKSAKKDRILKLFPGEKNSGIFSEFLKLIVGNQADFKKYFNLDEKAPLHFSKESYDEDLETLLGYIGDDYSDVFLKAKKLYDAILLSGILTVTDNGTEAPLSSAMIMRYKEHEEDLALLKAYIRNISLETYNEVFKDNSKNGYAGYIDGKTSQEDFYVYLKNLLSNFEGADYFLEKIDREDFLRKQRTFDNGSIPYQIHLQEMRAILDKQAKFYPFLAKNKERIEKILTFRIPYYVGPLARGNSDFAWSIRKRNEKITPWNFEDVIDKESSAEAFINRMTSFDLYLPEEKVLPKHSLLYETFNVYNELTKVRFIAESMRDYFLDSKQKKDIVRLYFKDKRKVTDKDIIEYLHAEIDGYDGIELKGIEKQFNSSLSTYHDLLNIINDKEFLDDSSNEAIIEEIIHTLTIFEDREMIKQRLSKFENIFDKSVLKKLSRRHYTGWGKLSAKLINGIRDEKSGNTILDYLIDDGISNRNFMQLIHDDALSFKKKIQKAQIIGDKDNIKQVVQALPGSPAIKKGILQSIKIVDELVKVMGRKPESIVVEMARENQYTNQGKSNSQQRLKRLEESLKELGSKILKENIIDNNALQNDRLYLYYLQNGKDMYTGEELDIDRLSNYDIDHIIPQAFLKDNSIDNKVLVSSASNRGKSDDVPSLEVVKKRKTLWYQLLKSKLISQRKFDNLTKAERGGLSREDKAGFIQRQLVETRQITKHVARLLDERFNNKKDENNKTVRTVKIITLKSSLVSQFRKDFELYKVREINDFHHAHDAYLNAVVASALLKKYPKLEPEFVYGDYPKYNFRERKSATEKVYFYSNIMNIFKKSISLADETGESVWNKESDLATVRKVLSYPQVNIVKKVEEQNHGLDRKGLFNANLSSKPKPNSEYLDPKKYGGYAGISNSFAVLVKGTIEKGAKKKITNVLEFQGISILDRITYRKDKLNFLLEKGYKDIEEELIIELPKYSLFELSDGSRRMLASIGEIHKGNQIFLSQKFVKLLYHAKRISNTINENHRKYVENHKKEFEELFYYILEFNENYVGAKKNGELLKSAFQSWQNHSIDELCSSFIGLFELTSRGSAADFEFLGVKIPRYRYTPSSLLKDATLIHQSVTGLYETRIDLAKLGED

SEQ ID NO: 61 - protein, 1340 aa, Artificial Sequence
  1340 residue - marginal ancestral sequence reconstruction method - node 116
MKKPYSIGLDIGTNSVGWAVITDDYKVPSKKMKVLGNTDKRFIKKNLIGALLFDEGTTAEDRRLKRTARRRYTRRKNRLRYLQEIFSEEMSKVDSSFFHRLDDSFLVPEDKRGSKYPIFATLAEEKEYHKQFPTIYHLRKHLADSKEKTDLRLIYLALAHMIKYRGHFLYEEAFDIKNNDIQKIFNEFISIYDNTFEGSSLSGQNAQVEAIFTDKISKSAKRERVLKLFPDEKSTGLFSEFLKLIVGNQADFKKHFDLEEKAPLQFSKDTYDEDLENLLGQIGDDFADLFLAAKKLYDAILLSGILTVTDPSTKAPLSASMIERYENHQKDLAALKQFIKNNLPEKYDEVFSDQSKDGYAGYIDGKTTQEAFYKYIKNLLSKFEGADYFLDKIEREDFLRKQRTFDNGSIPHQIHLQEMNAILRRQGEYYPFLKENKEKIEKILTFRIPYYVGPLARGNRDFAWLTRNSDEAIRPWNFEEIVDKASSAEDFINKMTNYDLYLPEEKVLPKHSLLYETFAVYNELTKVKFIAEGLRDYFLDSGQKKQIVNQLFKEKRKVTEKDIIHYLHNEVDGYDGIELKGIEKQFNASLSTYHDLLKIIKDKEFMDDAKNEAILENIVHTLTIFEDREMIKQRLAQYDSLFDEKVIKALTRRHYTGWGKLSAKLINGIRDKQTGNTILDYLIDDGNSNRNFMQLINDDGLSFKEIIQKAQVIGKTDDVKQVVQELPGSPAIKKGILQSIKIVDELVKVMGHNPESIVIEMARENQTTARGKKNSQQRYKRIEDALKNLASGILKENPTDNNQLQNDRLFLYYLQNGKDMYTGEALDINQLSSYDIDHIIPQAFIKDDSLDNRVLTSSKDNRGKSDNVPSIEVVQKRKAFWQQLLDSKLISERKFNNLTKAERGGLDERDKVGFIKRQLVETRQITKHVAQILDARFNTEVNEKDKKNRTVKIITLKSNLVSNFRKEFRLYKVREINDYHHAHDAYLNAVVAKAILKKYPKLEPEFVYGDYQKYDPKEVEKATEKYFFYSNLLNFFKEEVHYADDTGEIAWNKEKDFATIKKVLSLPQVNIVKKTEEQTGGFSKESILPKGNSDKLIPRKISLDPKKYGGFDSPTIAYSVLVIADIEKGKAKKLKTVKELVGITIMEKAAFEENPITFLEEKGYKNIRKENIIKLPKYSLFELENGRRRLLASAKELQKGNEIVLPVHLTTLLYHAKRIHKINEPIHLEYVEKHRNEFKELLNLISEFSQKYILADNNLEKIKSLYDQNEDADIDQLANSFINLLTFTALGAPAAFKFLGVDIDRKRYTSVSEILNATLIHQSITGLYETRIDLSKLGED

SEQ ID NO: 62 - protein, 1340 aa, Artificial Sequence
  1340 residue - marginal ancestral sequence reconstruction method - node 117
MKKPYSIGLDIGTNSVGWAVITDDYKVPSKKMKVLGNTDKHFIKKNLIGALLFDEGTTAEDRRLKRTARRRYTRRKNRLRYLQEIFSEEMSKVDSSFFHRLDDSFLVPEDKRGSKYPIFATLAEEKEYHKKFPTIYHLRKHLADSKEKTDLRLIYLALAHMIKYRGHFLYEESFDIKNNDIQKIFNEFISIYDNTFEGSSLSGQNAQVEAIFTDKISKSAKRERVLKLFSDEKSTGLFSEFLKLIVGNQADFKKHFDLEEKAPLQFSKDTYDEDLENLLGQIGDDFADLFLVAKKLYDAILLSGILTVTDPSTKAPLSASMIERYENHQKDLAALKQFIKNNLPEKYDEVFSDQSKDGYAGYIDGKTTQEAFYKYIKNLLSKFEGADYFLDKIEREDFLRKQRTFDNGSIPHQIHLQEMNAILRRQGEHYPFLKENKEKIEKILTFRIPYYVGPLARGNRDFAWLTRNSDQAIRPWNFEEIVDKASSAEDFINKMTNYDLYLPEEKVLPKHSLLYETFAVYNELTKVKFIAEGLRDYFLDSGQKKQIVNQLFKEKRKVTEKDIIHYLHNEVDGYDGIELKGIEKQFNASLSTYHDLLKIIKDKEFMDDAKNEAILENIIHTLTIFEDREMIKQRLAQYDSLFDEKVIKALTRRHYTGWGKLSAKLINGIRDKQTGNTILDYLIDDGDSNRNFMQLINDDGLSFKEIIQKAQVVGKTDDVKQVVQELPGSPAIKKGILQSIKIVDELVKVMGHNPESIVIEMARENQTTARGKKNSQQRYKRIEDALKNLAPGILKENPTDNIQLQNDRLFLYYLQNGKDMYTGKALDINQLSSYDIDHIIPQAFIKDDSLDNRVLTSSKDNRGKSDNVPSIEVVQKRKAFWQQLLDSKLISERKFNNLTKAERGGLDERDKVGFIKRQLVETRQITKHVAQILDARFNTEVNEKDKKNRTVKIITLKSNLVSNFRKEFKLYKVREINDYHHAHDAYLNAVVAKAILKKYPKLEPEFVYGDYQKYDPKDVEKATEKYFFYSNLLNFFKEEVHYADDTGEIAWNKEKDFATIKKVLSLPQVNIVKKTEEQTGGLFDNNIVSKKDASKLIPIKSSLSPEKYGGYARPTIAYSVLVIADIEKGKAKKLKRIKEMVGITIQDKKKFEANPITYLEERGYKNINSNLIIKLPKYSLFEFNDGQRRLLASSIELQKGNELILPYHLTALLYHAQRINKINEPIHKQYVETHQNEFKELLTTIISLSKKYIQKPNVESLLQQAFDQNADKDIYQLSESFISLLKLTSFGAPGAFKFLGVEISQSRYKSVSQFLNATLIHQSITGLYETRIDLSKLGED

SEQ ID NO: 63 - protein, 1340 aa, Artificial Sequence
  1340 residue - joint ancestral sequence reconstruction method - node 60
MKKEYSIGLDIGTNSVGWAVTDENYKLVRKKMKVLGNTDGKSKGKALWGARLFDSAETAEERRMHRTTRRRYTRRRWRIELLQEIFQEEISKVDPSFFIRLNESRLHPEDKTDDRHPLFGDKETDKDYHKQYPTIYHLRKHLMENDEKHDIRLVYLALHHIIKHRGHFLIEGDLSSKNTDVEELFKQLVQVFNDALEEEHLSEEANDIEEILTDKKSRSARAKEVVKLFASEKKQACISALLKLIVGLKGNLKKVFGDSEDTAIHFSKDNYEEDVEAIRDTIPDEYSELFEAIKALYDAIVLSGILGGSTNNTEAKVSASMIARYEQHRKDLKLLKNFVKTYLPEKYNEIFSDDTKNGYSAYIKGGTSQEDFYKYLKKILKELEEAEYLLEEIENENFLPKQRTSDNGVIPYQIHLEELRAILKNQGKYYPFLLENAEKIESILAFRIPYYVGPLSRGNGRFAWMIRKEDGVITPWNFDEVVDKEKSAEEFIERMTGNCTYLPGETVLPKNSLLYEKFTVLNELNNVRLTIDKGKWRRFSAEQKQEIFDDLFRKNRKVTKKKLEDYLKREYGEFDSADISGIDGEFKSSLGSYHDFCKILVKADSLDEEDYKDIIEEIIKWLTVFEDRKMLKRRLEKYGEILTEEQIKKICKRHYTGWGRLSRKLLTGVRDAETGKSIIDVLRETDPSNRNFMQLLSDEDLGFQEEIEQLNAEKAGENLKEIVEDLPGSPAVKRGINQALRIVDEIVKVMGHEPKRIFVEMAREKQQSKRGRRSTKKRLKRLQEALKNLGTNLWKELLRDDNELRNDRLFLYYTQMGKCMYSGEPIDLDDLSNYDIDHIIPQSFIKDDSLDNRVLVSREENARKTDNLPSPEIRRKMKPFWQMLLNAGLISKKKFDRLTRTDRGEFTEDELAGFIARQLVETRQITKHVATLLKQRYPTEKDEEDKTIKNTKIVSVKANLVSEFRQDFGLIKCREVNDYHHAHDAYLNAVVGNALLKKYPKLAAEFIKGDYRRNNAREENKANAKMHFYGNIMNSFTSDEPIADETGEIVWDKEKDIATVRKVMNYHQVLITRKVEEETGGFFDQTIYSKGNSKKLIPLKKNLDPEKYGGYNSETAAYSVLVEYDIEKGKAKKEKTVKQLVPIPVREKAALEKNPSKYLEKKGYENPKVNLLIKIPKNQLLELDGGRRRILAAAKELKNATQLVLPAEEYTLLEKVAKIAEKNNSESIGYVEELLAQFDELLDSLIDYSPKLALQDKTLEKLKEAFEKLNLADKKEVAKEIIGLLHCTATTANTALKSLGGSKNRMRYTSIKKLNNASLIHQSITGLYETRIDLGKLGED

SEQ ID NO: 64 - protein, 1340 aa, Artificial Sequence; identical to SEQ ID NO: 63
  1340 residue - joint ancestral sequence reconstruction method - node 61

SEQ ID NO: 65 - protein, 1340 aa, Artificial Sequence
  1340 residue - joint ancestral sequence reconstruction method - node 62
TTDEYSIGLDMGTNSVGWAVTDKNGSMAHKKMPTLGNTDGKSKGKPTLGSRLFDAAETAAEARAHRGQRRRYVRRRWRLDLLQGLFQDEINKVDSEFFIRLRQSRLHVEDRADYRWPLFNDTDTEKDYYKRFPTIYHLRKWLMETDEKADIRLIYLAVHNIVKHRGNFLREKNLSSRNADPAEAVRHLRQALNDWLERGYLAEADNHILDILTDSKRRSDQAKEIAKLFGTEQSKACNSALAKAIVGLKAELKNVFGEAEKTAIHLSSDNYEDDVEAIRDAIPDDSGELFQALCALYSAYVLQGLLSYAPGQTEAKISANMVAKYDQYGKDLKLLKNLARTYVSEKYDAFFRGETYEGSSDYVQGYASYDDFQKSVKKLFKQLEEDRYMMKAFGEEKFLRRLKTSDNGSIYYQLHLEELRAILKNQGKHYPFLLEEEEKIESLVSFRIPYYVGPLSRENERFAWSSRMEDAVITPWNWDEIIDRDKSAEEFILRMTGDCTYLQGEPVLPKCSLLYEEFCVLNELNGARWTIDEDDWRRFDAAQREGILHDLFRKTRKVTYKKVADWLEREYENFANAHVRGGQGEFESKLGSYIFFCKDVFKTDSLDEADYKPMIEQIILWSTLFEDRDILKRKIEAYGEHLTDEQIKVICKKRFTGWGRLSRKLLTGIKDADTGRSIIDVLREGNPNSRTFMEVLRDEDLGFQKKIDDFNKDYAGENLMDIVNDLPGSPAIRRSINQAIRIVDEIVSIAGKEPSNIFIEVTREEDDPRKKGRRTKRRYEAIKNALENFKTDLWKELLKKDSNNLDERLSLYFMQRGKCMYSGRPIKLEELHKYEVDHIIPRSYIKDDSLENKVLVCREENQRKTDTLLDPAIRRKMGKYWRMLHNAKLIGDKKFNNLFRRDRGEIDDKTLKGFVARQLVETSQMVKLVQTLLEARYPTEKDEEDKTIKNTKIVPVKANISHDLREAAGLVKCREANDFHHAHDAYLACRVGLFIQKRHPSVYANHIMRDYARKQAREYNKTHSMAHTKGFIVNSFMSSEFDKDETGEIFWDAEAEVEDIRRVLNYRQCFISRMPVEDTGAFWDQTIYSPRSNKKLLPLKRDLDPDKYGSYSREQFAYSVFFIYDIEARDAKKEKTVLQFAQVPVRVTAAIAKDPSKYASKLGQENLEFTRIIRILKKQLLELDNGDRLIITGAKEVRNATEFAFSLEETTLVERCAQIAKEGNPEDIGYVEQLSAQLNELFSSLIERGPKLGVRLHAQLKLDQYLRKFDDAALRDKAKVIIGLISITNGATNTALSSLGGSKNRMRYTHNKLLNNASLIDQSVTGMFERRTHIGLLGED

SEQ ID NO: 66 - protein, 1340 aa, Artificial Sequence
  1340 residue - joint ancestral sequence reconstruction method - node 63
MKKEYSIGLDIGTNSVGWAVTDENYKLVRKKMKVLGNTDGKSKGKALWGARLFDSAETAEERRMHRTTRRRYTRRRQRIELLQEIFQEEISKVDPSFFIRLNESRLHPEDKTDDRHPLFGDKETDKDYHKQYPTIYHLRKHLMENDEKHDIRLVYLALHHIIKHRGHFLIEGDLSSKNTDVEELFKQLVQVFNDALEEEHLSEEAIDIEEILTDKKSRSARAKEVVKLFASEKKQACISALLKLIVGLKGNLKKVFGDSEDTAIHFSKDNYEEDVEAIRDTIPDEYSELFEAIKALYDAIVLSGILGGSTNNTEAKVSASMIARYEQHRKDLKQLKNFVKTYLPEKYNEIFSDDTKNGYSAYIKGGTSQEDFYKYLKKILKELEEAEYLLEEIENENFLPKQRTSDNGVIPYQIHLEELRAILKNQGKYYPFLKENAEKIESILAFRIPYYVGPLSRGNGRFAWMIRKEDGVITPWNFDEVVDKEKSAEEFIERMTNNCTYLPGETVLPKNSLLYEKFTVLNELNNVRLTIDKGKWRRFSAEQKQEIFDDLFRKNRKVTKKKLEDYLKREYGEFDSADISGIDGEFKSSLGSYHDFCKILVKADSLDEEDYKDIIEEIIKWLTVFEDRKMLKRRLEKYSEILTEEQIKKICKRHYTGWGRLSRKLLTGVRDKETGKSIIDVLRETDPSNRNFMQLLSDEDLGFQEEIEQLNAEKAGENLKEIVEDLPGSPAVKRGINQALRIVDEIVKVMGHEPKRIFVEMAREKQQSKRGRRSTKKRLKRLQEALKNLGTNLWKELLRDDNELRNDRLFLYYTQMGKCMYSGEPIDLDDLSNYDIDHIIPQSFIKDDSLDNRVLVSREENARKTDNLPSPEIRRKMKPFWQMLLNAGLISKKKFDRLTRTDRGEFTEDELAGFIARQLVETRQITKHVATLLKQRYPTEKDEEDKTIKNTKIVSVKANLVSEFRQDFGLIKCREVNDYHHAHDAYLNAVVGNALLKKYPKLAAEFIKGDYRRNNAREENKANAKMHFYGNIMNSFTSDEPIADETGEIVWDKEKDIATVRKVMNYHQVLITRKVEEETGGFFDQTILSKGNSKKLIPLKKNLDPEKYGGYNSPTAAYSVLVEYDIEKGKAKKEKTVKQLVPIPVREKAALEKNPIKYLEKKGYENPKVNLLIKIPKNSLLELDGGRRRILAAAKELKNATQLVLPAEEYTLLEKVAKIAEKNNSESIGYVEELLAQFDELLDSLIDYSPKLALQDKTLEKLKEAFEKLNLADKKEVAKEIIGLLHCTATTANTALKSLGGSKNRMRYTSIKKLNNASLIHQSITGLYETRIDLGKLGED

SEQ ID NO: 67 - protein, 1340 aa, Artificial Sequence
  1340 residue - joint ancestral sequence reconstruction method - node 64
MKKEYYIGLDIGTNSVGWAVTDENYNLVKRHMKVLGNTDGKSKGKAMWGVRLFDTAETAEERRMYRTSRRRLQRRKQRIELLQEIFSEEISKVDPSFFIRLNESRLHPEDKTEDRYPLFVDKETDKDYHKQYPTIYHLRKELMENDEPHDIRLVYLALHHIIKHRGHFLIEGDLSSKNTDLGEVFSQLVKVFNDALEIELLSEEALEIEEILTDKKSKSAKAKEVVKLFASEKKQACIKALLKLIVGLTGNLSEIFGDSEDTSINFSDSNYEENVEAIEDTIPDEFSELIEAIKALYDWAVLVGILGGSTYISEAKVKASMIARYEKHRKDLKQLKNLVKTYLPEEYKEIFSSDKKNGYSAYIKNGCSQEDFYKYLKKILKELEEAEYLLEEIENETFLPKQRSKDNGVIPYQVHLLELKKILKNAGEYLPFLKENAEKIESIFEFRIPYYVGPLSRGNGSNAWMIRKEDGKIYPWNFDDVVDVEKSAEEFIERMTNKCTYLPGEDVLPKNSLLYSKFMVLNELNNLRIDGDKIKWRRFSVELKQEIYNDLFCRNRKVTGKKLKDYLKREYGELDEADISGIDGDFKSSLGSYHDFKKILGKGNSLDEEDYKDIIEEIIKWITIFDDKKMLKRRLKKYPEILSEEQIKKICKLKYTGWGRLSREFLTGVRDKETGESIINALWETDPSNDNLMQLLSNQDYGFQEEIEQLNAEKAGENSYETVEDLYVSPAVKRAIWQTLQIVEEIVKVMGHEPKRIFVEMAREKQQNKRGRTSRKKRLKELYKSCKNDATNLWKELLRDDNELRSDKLFLYYTQMGKCMYSGEPIDLDDLFNYDIDHIYPQSKIKDDSLDNRVLVRKELNAKKTDNLPSPEIREKMKPFWQMLLNKGFISKKKYDRLTRTTRGEFTEDELAGFIARQLVETRQSTKAVAELLKQLYPTEKDEEDKTIKNTEIVYVKANLVSEFRQDFDLIKCREVNDYHHAKDAYLNIVVGNVYHVKYTKNAAKFIKGNRGRNYAREENKANAKMHFYGNIKKMFTSDVPIADRNGEIVWDKDKSIATVRKVMNKNNILYTRYTYEEKGGLFDQTILKKGNSQKLIPLKKNLDPEKYGGYNSPTAAYFALVEYDIEEGKKKKEKTTKQLVPIPVYEKAKLESNAIKYLEERGLKNPKVNLLIKIKKNSLLEMDGYRMRISGATIIFKNAVQLVLDEENYKILKKVAKVLEKNENQTIGYTEELLALYEELLDKLKDYKNRLANQAKTLEKGKEAFEKLNLEDKAEVINEIIRLFHCNATTANNALKLIGGSKNRMTNNNISKSNKVSLIHQSITGLYETKIDLGKIGED

SEQ ID NO: 68 - protein, 1340 aa, Artificial Sequence
  1340 residue - joint ancestral sequence reconstruction method - node 65
MKKEYYLGLDIGTNSVGWAVTDENYNLVKRHMKVLGNTDGKSKGKAMWGIRLFDTAETAEERRMYRSSRRRLQRRKQRIELLQEIFSEEIAKVDPTFFIRLNESRLHPEDKTEDKYPLFVDKETDKDYHKQYPTIYHLRKELIENPEPHDIRLVYLALHHIIKHRGHFLIEGDSDSKNTDLSEVFSELVKVFNDALEIELLSTEALELEEILTDKKSKSAKAKEVAKLFADEKEQQCIKALSKLIVGLTGNISEIFHQSEDTSINFSDSNYEENVEAIEDTIPDEFSELIDAIKALYDWAVLVGILGGSTYISEAKVKASMIARYEKHRKNLKQLKNLVKTYLPEEYKEFFSSDEKNGYSAYIKNGCSEEDFYKYLKKILKEKEEAEYLLAEIENETLLPLQRSKDNGTIPYQVHLLELKKILENAGEYLPFLKENAEKIISIFEFRIPYYVGPLSRGNGSNAWMIRKEDGKIYPWNFDDVVDVEKSNEEFIERMTNKCTYLPGEDVLPKNSLLYSKFMVLNELNNLKIRGNKIKWRRFSVELKQEIYNDLFCRNRKVTGKKILDYLKREYGELDEADISGIDGDFKSALASYHDFKKLLGKGNSLDEEDYKEIIEEIIKWKTIYDDNKMLKRMLKKYPEILSEEQIKKICKLKYTGWGNFSREFLTGVRGKETGESIINALWETDPSNDNLMQLLSNQDYSFQEEIDQINAEKAGENSYETVEDLYVSPANKRAIWQTLQIVEEIVKVMGHEPKRIFVEMARGKEKNKKRTTSRKKRLKELYKSCKNDTTNLWKELLRDDNELRSKKLFLYYTQMGKCMYSGEPIDLDDLLNWDIDHIYPQSKIKDDSLDNMVLVRKELNAKKTNNLLSPEIREKMKPFWQMLLNKGFISKKKYDRLTRTTRGEFTEEELSGFIARQLVETRQSTKAVAELLKQLYPTEKDEEDKTIKNSEVVYVKANLVSEFRQDFDLLKCREVNDYHHAKDAYLNIVVGNVYHVKYTKNPAKWIKGNRDSNYAREENKANAKMHFYGSIKKMFTSDVKNADRNGEIVWNKDKSIDQIRKIMNKNNILYTEYTYCEKGQLFNQTILKKGNSEKLIPLKKNLDPEKYGGYTSPKASYFALVEFDIEEGKKKKEKTTKQLIPVPVYEKAKLESNAIKYLEERGLTNVVVNLKIKIKKNSLLEMDGYRMRIRGATIIFKNAVQLVLDEENYEILRKVEKYLEKNENQTIGFTEELLSLYEELLDKLKDYKNRPANQAKTLEKGKEAFESLNLEDKAEVINEIIRLFHCNATTASNALKLINGSKNRMTNKNILKSNKVKLIHQSITGLYETKIDLGKIGED

SEQ ID NO: 69 - protein, 1340 aa, Artificial Sequence
  1340 residue - joint ancestral sequence reconstruction method - node 66
MKKEYYIGLDMGTNSVGWAVTDENYNLCKRHMKVLGNTDGKSKGKAMWGVRLFDTAETAEERRMFRTSRRRLQRRKQRIELLQEIFSEEISKVDPSFFLRLNESKLYPEDKTELPYALFVDKETDKDYHKQYPTIYHLRKELMENDEPHDIRLVYLALHHIIKHRGHFLFEGDLSSKNTDFGAVFSQLLKVINDELEIELLSEEALQIEEILKDKKSKSAKATEVVKLLASEKKQACIKALLKLISGLTVKLSEIFGDGERTSISFADSNYEENVEAIEDTLPERFSELIEAIKALYDWAVLVDILGGSTYISEAKVKTSMIARYEKHRKDLKQLKNLVKTYLPEEYKEIFSSDKKNNYSAYIKNGCSQEDFYKYLKKNLKELEEAEYLLEEIENETFLPKQVSKDNGVIPYQVHLLELKKILKNAGEYLPFLKENAEKIEQIFEFRIPYYVGPLNRGNGENAWMVRKEDGKIYPWNFDNVVDVEKSAEEFIERMTNKCTYLPGEDVLPKNSLLYSKFMVLNELNNLRIDGEKIKWRRFSVELKQEIYNDLFCRNRKVTGKKLKDYLKREGGELKEAEISGIDGDFKSSLRSYHDFKKILGKGNSLDEEDTKDIIEEIIKNITIFDDKKMLKRRLKKYPEILSEEQIKKICKLKYTGWGRLSREFLTEVRDKETGENIINALWETDPSNDNLMQLLSNQDYGFQEEIEQLNAEKAGENSYETVEDLYVSPAVKRAIWQTLQIVEEIVKVMGHEPKRIFVEMAREKQQNKRGRTSRKKRLKELYKSCKNDATDLWKELLRDDNELRSDKLFLYYTQMGRCMYSGEPIDLEDLFNYDIDHIYPQSKVKDDSLDNRVLVKKELNAKKTDNYPSPEIREKMKPFWQMLLNKGFISKKKYDRLTRTTRGEFTEDELAGFIARQLVETRQSTKAVAELLKQLYPTEKDEEDKTIKNTEIVYVKANLVSEFRQDFDFIKCREVNDYHHAKDAYLNIVVGNVYHVKYTKNAAKFIKGNPGRNYAREENKANAKMHFYGNLKKMFTSDVPIADRNGEIVWDKDKSIATVRKVMNKNNILYTRYSYEEKGGLFDQQILKKGNGQALIPLKKRLDIEKYGGYNKPTAAYFALVEYDIEEGKKGKEKTTKQLVPIPVYEKAKLESNAIKYLEERGLKNPKVNLLIKIKKNSLLEVDGFRMHISGRTIIFKSAVQLVLDEENEKILKKVAKVLEKQENQKIGYTEELLALYEELLDKLKDYKIRLANQAKTLENGKEKFEKLNLEDKCQVINEILRLFHCNATTANNALSLIGGAKNIMTNNNISKSNKVSLINQSITGLYETKIDLGKIGED

SEQ ID NO: 70 - protein, 1340 aa, Artificial Sequence
  1340 residue - joint ancestral sequence reconstruction method - node 67
MKKEYYVGLDMGTGSVGWAVTDENYNICKRHMKVLGNTDGKSKGKAMWGVRLFETAKTAEERRMFRTSRRRLQRRKQRIELLQEIFAEEISKVDPGFFLRMKESKYYPEDKPELPYALFVDKETDKDYHKQYPTIYHLRKMLMENEEPHDIRLVYLALHHIIKHRGHFLFEGDISSKVTDFGAAFSQFLKVINDELEIELLDEEALQIEEILKDKKSKSAKKTELVKLLAAEKKQACEKALLKLISGCTVKLSEIFGDGERTKISFADSNYEEYVAAVEDTLAERFLELIEAAKALYDWAVLVDILGGSTYISEAKVKTSMIARYEKHRKDLKQLKNLVKTYLPEEYKDIFSSDKKNNYSAYIKNGCSKEDFYAFLKKNLKELEEAEYLLEEIENETFLPKQVSKDNGVIPYQVHLLELKKILKNAGEYLPFLKENAEKIEQIFEFRIPYYVGPLNKGNGENAWAVRKEDGKIYPWNFENVIDVEESAEKFIGRMTNKCTYLPGEDVLPKDSLLYSKFMVLNELNNLRIDGEKIKWRRFSVELKQEIYEDVFCRYRKVTGKKLKDYLIREGIIGKEAEISGIDGDFKSSLRAYHDFKKILGKGKLLDVELTQNEKEEIIKNITIFDDKKMLKKRLKKYPEILSEKQIKKICALKYTGWGRLSREFLEEVQAKETGENIITALWETDPSNDNLMQLLSNQDYGFQEEIEQLNAEKAGKNSYETVEDLYVSPAVKRPIWQTLQIVEEIEKVMGHKPKRIFVEMAREKQQNKRGRTSRKKRLKELYKSCKNEAPDLWKELLHDDNKLRSDKLFLYYTQMGRCMYSGEPIDLEDLFKYDIDHIYPQSKVMDDSLDNRVLVKKELNAKKTDNYPSAEIREKMKPFWDMLLNKGFISKEKYDRLTRNTRGEFTENELAGFIARQLVETRQSTKAVAELLKQAYPTEKDEEDKTIKETEIVYVKANTVSEFRQDFDFIKVRDVNDYHHAKDAYLNIVVGNTYYVKFTKNAAWFIKGNPGRTYAREENKANAKMHFYGNLKKMFTSDVAIADRNGEIAWGKDGTIVTVRKVMNKNNILFTRRSYEVKGGLFDQQIMKKGKGQALIPVKERLSIEKYGGYNKATGAYFMLVESDIEEGKKGKEKTTKQLVPIPVYEKAKLESNAIRYLEERGLKNPKVNLLIKIKKDSLFEVDGFRMHLSGRTLIFKCANQLVLDEENEKILKKVAKVLEKQKNVKIGYTEELLAKYEEFLDKLKDYNIRLSTQAKTLENGKEKFEKLSLEDKCQVINEILHLFQCQSTAANNALSLIGGAGNILVNNNISKCNKVSIINQSITGLYEQEIDLKKIGED

SEQ ID NO: 71 - protein, 1340 aa, Artificial Sequence
  1340 residue - joint ancestral sequence reconstruction method - node 68
MKKEYYVGLDMGTGSVGWAVTDESYHICRRHMKVLGNTDGKSKGKAMWGVRLFETAKTAEERRMFRTSRRRLDRRKRRIELLQEIFAEEISKVDPGFFLRMKESKYYPEDKPELPYALFVDKETDKDYHKQYPTIYHLRKMLMENEEPPDIRLVYLALHHMIKHRGHFLFAGDISEKVTDFGAAFSQFLKVIKDELDIELLDEEALQIEEILKDKLTRSAKKTELVKGLKAEKKNACEKALLKLISGCTVKLSEIFGDGERPKISFADSNYEEYVAVVEDELGERFLEIIEAAKALYDWAVLVDILGGSTSISEAKVRTSMIARYEKHRKDLKYLKNLVKTYLPEEYKDIFSSDKKNNYSAYIKNGCSKEDFYAFLKKNIKELEEAEYLLEELEKETFLPKQVSKDNGVIPYQVHLLELKKILKNAGEYLPFLKENAEKIEQIFEFRIPYYVGPLNKGNGEFAWAVRKSNEKIYPWNFENVIDVEASAEKFIRRMTNKCTYLPGEDVLPKDSLLYSKFMVLNELNNLRIDGEKIKWRRFSVELKQEIYEDVFCRYRKVTAKKLKDYLIREGIIGKDAEISGIDGDFKGSLRAYHDFKKILGKGKLLDVELTQNEKEEIILNITLFDDKKLLKKRLKKYPQILTEKQIKKICALNYTGWGRLSREFLEEVQAPETGENIITALWETDPSNDNLMQLLSNQDYGFQEEIEQLNAEKAGKNSYETVEDLYVSPAVKRQIWQTLQIVKEIEKVMGEKPKRVFVEMAREKQENKRGRTSRKKRLKDLYKSCKNEEPDWWKELLHEEHKLRSDKLFLYYTQKGRCMYSGEPIDLEDLWKYDIDHIYPQSKVMDDSLNNRVLVKKEYNAKKTDNYPSAEIRQKMKPFWDSLLNGGFISKEKYDRLIRNTRGEFTANELAGFIERQLVETRQSTKAVAEILKQAFPTEKDEEDKTIKETEIVYVKAKTVSEFRQDFDFIKVRDVNDFHHAKDAYLNIVVGNTYYVKFTKNAAWFIKGNPGRTYAREENKANAKMHFYGNLKKMFTSDVAIADRNGEIAWGKSGTIVTVRKMMNKNNILFTRRSYEVKGGLFDQQIMKKGKGQALIPVKERLSIEKYGGYNKATGAYFMLVESDIEEGKKGKEKTTIEFVPIPLYEKAKLESNEARFLEERGLKEPKVNLLIKIKKDTLFEVDGFKMHLSGRTLIFKCANQLILDEENEKILKKVAKVIERQKNVKIGYTEELLAKYEEFLDKLKNYGIRLSTQAKTLENGKEKFEKLSLEDKCQVLNEILHLFQCQSSAANNALSMIGGPGNILVNNNISKCNKISIINQSPTGIYEQEIDLKKIGED

SEQ ID NO: 72 - protein, 1340 aa, Artificial Sequence
  1340 residue - joint ancestral sequence reconstruction method - node 69
MEKEYYVGLDMGTGSVGWAVTDESYHILRRHMKVLGNTDGKSKGKAMWGVRLFESAKTAEERRMFRTSRRRLDRRNWRIEILQEIFAEEISKVDPGFFLRMKESKYYPEDKPELPYALFVDKETDKDYHKKYPTIYHLRKMLMETEETPDIRLVYLALHHMMKHRGHFLLSGDISEKVTEFGTTFSQFLENIKNELDFELLDEEALQIEEILKDKLTRSAKKTKLVKGLKAEKKNVCEKALLKLLSGGTVKLSDIFGMGERPKISFADNGYEEYVAVVEDELGERFYEIIEAAKAVYDWAVLVDILGGSTSISEAKVRTSMIARYEKHKSDLKYLKNIVKKYLPEEYKDIFSSDKLNNYSAYIKNGCSKEEFYDFLKKNIKELEEQEYLQEELEKETFLPKQVNKDNGVIPYQVHLYELKKILDNLGDKIPFLKENAEKIEQLFEFRIPYYVGPLNKGNGEFAWAVRKSNEKIYPWNFENVIDVEASAEKFIRRMTNKCTYLMGEDVLPKDSLLYSKFMVLNELNNLRLDGEKIKWRRFSVELKQKIYEDVFCRYRKVTAKKLKNYLIREGIIGKNVEITGIDGDFKGSLTAYHDFKKILGKGKLLDVELTQNEKEEIILNITLFDDKKLLKKRLKKYPQILTEKQIKKICALSYTGWGRLSKKFLEEVTAPETGENIITALWETDPSNDNLMQLLSNEDYRFQEEIEQFNAEKAGKNSYETVEDLYVSPAVKRQIWQTLQIVKEIEKVMGEKPKRVFVEMAREKQENKRGRESRKKRLSDLYKSCKNEEPDWWKELLHEEHKLRSDKLYLYYTQKGRCMYSGEPIDLEDLWKYDIDHIYPQSKTMDDSLNNRVLVKKEYNAKKSDNYPSADIRQKMKPFWKSLLNGGFISKEKYDRLIRNTRGELTANELAGFIERQIVETRQSTKAVAEILKQVFPTEKDEEDKTIKETEIVYVKAKTVSKFRQDFDFIKVRDVNDLHHAKDAYLNIVVGNTYYVKFTKNAAWFIKENPGRTYAREENKANAKMHFYGNLKKMFTSDVAIADRNGEIAWGKSGTIVTVRKMMNKNNILVTRRSYEVKGGLFDQQIMKKGKGQALIPVKERLSIEKYGGYNKAAGAYFMLVESDIEEGKKGKEKTTIEFVPIPLYEKAKLESDEARFLEERGLKEPKVNILIKKIKDTLFEVDGFKMWLSGRTLIFKCANQLILDEENMKTLKKVVKFIQRQKNVKIGITEEVLMKYETFLDKLKNYGIRLSTQAKTLVNGKEKFEKLSLEDKCQVLYEILHLFQCQSSAANNALKMIGGPGNILVNNNISKCNKISIINQSPTGIYEKEIDLLKIGED

SEQ ID NO: 73 - protein, 1340 aa, Artificial Sequence
  1340 residue - joint ancestral sequence reconstruction method - node 70
MKKEYSIGLDIGTNSVGWAVITDDYKLVRKKMKVLGNTDKKSIKKNLWGARLFDSGETAEDTRLKRTTRRRYTRRRNRICYLQEIFQEEMNKVDDSFFHRLDESFLVPEDKKHDRHPIFGNLEEEVAYHEQYPTIYHLRKHLADSSEKADLRLVYLALAHIIKYRGHFLIEGDLNTENTDVEELFKQFVQVYNQTFEEQHLSEETIDVEEILTEKVSRSRRAENVIKLFPNEKKNGLFGQLLKLIVGLQGNFKKVFDLSEDAKLQFSKDTYEEDLEALLANIGDEYADLFLAAKNLYDAILLSGILTTTDNNTKAKLSASMIERYEEHKKDLAQLKQFIKEHLPEKYNEIFSDSSKNGYAGYIDGKTSQEDFYKYLKKILSKIDGAEYFLEKIEQENFLRKQRTFDNGVIPHQIHLEELRAILRRQGKYYPFLKENQEKIESILTFRIPYYVGPLARGNSRFAWLIRKSDEAITPWNFDEVVDKEKSAEAFIERMTNYDTYLPNEKVLPKHSLLYEKFTVFNELTKVRYVTDRGKTRRFSAEQKQEIFDDLFKKNRKVTKKKLEDYLKKEYEEFDSADITGIEDEFNASLGTYHDLLKILVSKDFLDDEENEDILEDIVKILTVFEDRKMIRKRLEKYSDILTEEQLKKLERRHYTGWGRLSAKLINGIRDKQSGKTILDYLIDDDSSNRNFMQLINDDNLSFKEEIEKAQAIKETENLKEIVQDLPGSPAIKKGILQSLKIVDELVKVMGHEPKNIVVEMARENQTTNRGRRNSKQRLKRLEEALKNLGSNLLKEHPVDNQQLQNDRLYLYYLQNGKDMYTGQELDIDNLSNYDIDHIIPQSFIKDDSIDNRVLVSSEENRGKSDNVPSKEVVRKMKPFWQKLLNAGLISQRKFDNLTKAERGGLTEDDKAGFIKRQLVETRQITKHVATILDQRFNTEKDEEDKTIRNVKIITLKSNLVSQFRKDFGLYKVREINDYHHAHDAYLNAVVGTALLKKYPKLEPEFVYGDYRKNNAREENKATAKMHFYSNIMNFFSSEEPIADETGEIVWDKEKDIATVRKVLSYHQVNIVKKVEVQTGGFSKETILPKGNSNKLIPRKNNWDPKKYGGFDSPTVAYSVLVTYDIEKGKAKKLKTVKELVGITIMERSAFEKNPIAYLEKKGYQNPKENLLIKLPKYSLFELENGRRRMLASAKELQKGNQMVLPAHLVTLLYHAKRIDESNNSESLEYVEEHRAQFDELLDYIIDFSEKYILADKNLEKIKELYEENNEADIKELAKSFINLLTFTAMGAPAAFKFFGENIDRKRYTSIKELLNATLIHQSITGLYETRIDLGKLGED

SEQ ID NO: 74 - protein, 1340 aa, Artificial Sequence
  1340 residue - joint ancestral sequence reconstruction method - node 71
MKKEYTIGLDIGTNSVGWAVITDDYKLVRKKMKVLGNTDKKSIKKNFWGVRLFDSGETAEDTRLKRTTRRRYTRRRNRICYLQEIFQEEMNKVDDNFFHRLDESFLVPEDKKHDRHPIFGTLEEEVAYHEQYPTIYHLRKHLADSSEKADLRLVYLALAHIIKYRGHFLIEGELNTENTSVEELFKQFVQVYNQTFSEQELVDETIDVEEILTEKVSRSRRAENVLKLFPNEKSNGLFGQFLKLIVGNQGNFKKVFDLEEDAKLQFSKDTYEEDLEALLANIGDEYADVFLAAKNLYDAILLSGILTTTDNNTKAKLSASMIERYEEHKKDLAQLKQFIKEHLPEKYNEIFNDSSKNGYAGYIDGKTSQEDFYKYLKKILSKIDGAEYFLEKIEQENFLRKQRTFDNGVIPHQIHLEELRAILRRQGKYYPFLKENQEKIESILTFRIPYYVGPLAKGNSRFAWLIRKSDEPIRPWNFDEVVDKEKSATAFIERMTNYDTYLPNEKVLPKHSLLYEKFTVFNELTKVRYVDDRGKTQRFSAEEKQEIFDDLFKKNRKVTKKKLENYLKNEYQYIDSPTIKGIEDEFNASFGTYHDLLKIGVSKEFLDDEENEDILEDIVKILTVFEDRKMIRKQLEKYSDILSEETLKKLERRHYTGWGRLSAKLINGIRDKQSGKTILDYLIDDDSSNRNFMQLINDDNLSFKEEIEKAQAIKETENLKEIVQDLPGSPAIKKGILQSLKIVDELVEIMGYEPKNIVVEMARENQTTNRGKRNSKQRLKRLEEALKELGSNLLKEHPVDNQQLQNDRLYLYYLQNGKDMYTGQELDIDNLSNYDIDHIIPQSFITDNSIDNRVLVSSKENRGKSDNVPSKEVVRKMKPFWQKLLNAGLISQRKFDNLTKAERGGLTEDDKAGFIKRQLVETRQITKHVATILDQRFNTEKDEEDNTIRNVKIITLKSALVSQFRKTFGLYKVREINDYHHAHDAYLNAVVATTLLKVYPQLEPEFVYGEYRKNNAHEENKATAKKHFYSNIMKFFSSEEPIIDENGEILWDKEKDIATVKKVLSYHQVNIVKKVEIQKGGFSKETIQPKGNSNKLIPRKNNWDPKKYGGFDSPTVAYSVLITYDIEKGKKKKLKRVKEIVGITIMERSAFEKNPIAYLEKKGYQNPKENVLMKLPKYSLFELENGRRRMLASAKELQKGNQMVLPAHLVTLLYHAKRIDESNNSESLEYVEEHRAQFDELLDYIIDFSEKYILADKNLEKIKKLYEENNEADIKELAKSFINLLTFTAMGAPADFKFFGENIPRKRYTSIKELLNATLIHQSITGLYETRIRLGKLGED

SEQ ID NO: 75 - protein, 1340 aa, Artificial Sequence
  1340 residue - joint ancestral sequence reconstruction method - node 72
MKKEYTIGLDIGTNSVGWAVITDDYDLVRKKMKVLGNTDKKKIKKNFWGVRLFDEGETAEDTRLKRTTRRRYTRRRNRISYLQEIFQEEMNKVDENFFHRLDESFLVPEDKKHDRHPIFGTLEEEVAYHEQYPTIYHLRKHLADSSEKADLRLVYLALAHIIKYRGHFLIEGELNTENTSVEETFKQFLQVYNQTFSEQELVDETIDVEEILTEKVSRSRKAENVLKLFPNEKSNGLFGQFLKLIVGNQGNFKKVFDLEEDAKLQFSKETYEEDLEALLANIGDEYADVFLAAKNVYDAIELSGILSTTDNNTKAKLSASMIERYEEHKKDLAQLKQFIKEHLPEKYNEIFKDSSKNGYAGYIDGKTSQEDFYKYIKKILSKIDGAEYFLEKIEQENFLRKQRTFDNGVIPHQIHLEELRAILDRQGKYYPFLKENQEKIESLLTFRIPYYVGPLAKGNSRFAWLIRKSDEPIRPWNFDEVVDLEKSATRFIERMTNYDTYLPNEKVLPKHSLLYQKFTVFNELTKVRYIDDRGKTQNFSSEEKQEIFDDLFKKNRKVTKKDLENYLKNEYQYIDSPTIKGIEDSFNASFSTYHDLLKIGVSKEFLDDEENEEILEDIVKILTVFEDRKMIRKQLEKYSDILSEETLKKLERRHYTGWGRLSAKLINGIRDKQSNKTILDYLIDDDGSNRNFMQLINDDNLSFKEEIEKAQAIKETENLKEIVQDLPGSPAIKKGILQSLKIVDELVEIMGYEPKNIVVEMARENQTTNRGKRNSKQRLKRLEEALKELGSNLLKEHPVDNQQLQNDRLYLYYLQNGKDMYTGQELDINNLSNYDIDHIIPQSFITDNSIDNRVLVSSKENRGKSDNVPSKEVVRKMKPFWQKLLRAGLISQRKFDNLTKAERGGLTEDDKAGFINRQLVETRQITKHVANILDQRFNTEKDEEGNTIRNVKIITLKSALTSQFRKTFGLYKVREINDYHHAHDAYLNAVVATTLLKVYPQLEPEFVYGEYRKNNAFKENKATAKKHFYSNIMKFFSSEEPIIDENGEILWDKEKDIATIKKVLSYHQMNIVKKVEIQKGGFSKETIQPKGNSNKLIPRKNNWDPKKYGGFDSPTVAYSVVITYDIEKGKKKKLKRVKEIVGITIMERSAFEKNPIAYLEKKGYQNPKENVLMKLPKYSLFELENGRRRMLASAKELQKGNQMVLPAHLVTLLYHAKRYDESNNSESLEYVNEHRAQFDELLDYVIDFSEKYILADKNLEKIKKLYEENNEADIKELAKSFINLMTFTAMGAPADFKFFGENIPRKRYTSIKELLNATLIYQSITGLYETRIRLGKLGED

SEQ ID NO: 76 - protein, 1340 aa, Artificial Sequence
  1340 residue - joint ancestral sequence reconstruction method - node 73
MKKEYTIGLDIGTNSVGWAVITDDYDLVRKKMKVLGNTDKKKIKKNFWGVRLFDEGETAEDTRLKRTTRRRYTRRRNRISYLQEIFQEPMSEVDENFFHRLDESFLVPEDKKYDRHPIFGTLEEEVAYHEQYPTIYHLRKHLADSSEKADLRLVYLALAHIIKYRGHFLIEGELNTENTSISETFEQFLDVYNQTFSEQELVDETIKVEEILTEKVSRSRKAENVLKLFPNEKSNGLFGQFLKLIVGNQGNFKKVFDLEEDIKLQFSKETYEEDLEALLGNIGDEYADVFLAAKNVYDAIELSGILSTTDNNTKAKLSASMIERYEEHKKDLAQLKQFIKAHLPEKYYEIFKDSSKNGYAGYIDGKTSQEDFYKYIKKILSKTDNAEYFLEKIEQENFLRKQRTFDNGVIPHQIHLEELRAILDRQSKYYPFLKENREKIESLLTFRIPYYVGPLAKGNSRFAWLIRKSDEPIRPWNFDEVVDLEKSATRFIERMTNYDTYLPNEKVLPKHSLLYQKFTVFNELTKVRYIDDRGKTQNFSSEEKIEIFDDLFKKKRKVTKKDLVNYLENEYQYIDSPTIKGIEDSFNASFSTYHDLLKIGVSKEFLDDEENEEILEDIIKILTVFEDRKMIRKQLEKYSDILSEETLKKLERRHYTGWGRLSKKLINGIRDKQSNKTILDYLIDDDGSNRNFMQLINDDTLSFKEKIEKAQAIKETENLKEIVQDLPGSPAIKKGILQSLKIVDEIVEIMGYEPKNIVVEMARENQTTNRGKRNSKQRLKRLEEALKELDSNLLKEKPLDNEQLKNDRLYLYYLQNGKDMYTGQELDINNLSNYDIDHIIPQSFITDNSIDNRVLVSSKENRGKSDNVPSKEVVRKMKPFWQKLLRAGLISQRKFDNLTKAERGGLTEADKAGFINRQLVETRQITKHVANLLDQRFNTEKDEEGNTIRNVNIITLKSALTSQFRKKFGLYKVREINDYHHAHDAYLNAVVATTLLKVYPNLEPEFVYGEYRKNNMFKENKATAKKHFYSNIMKFFSSEEPIIDENGEILWDKEKDISTIKKVLSYRQMNIVKKVEKQKGRFYKETIHPKGNSNKLIPIKNNLDPKKYGGFNEPTVAYSVVITYDIEKGKKKKLKRVKEIVGIPIMERSAFEKNPTAYLEKTGYNNPKENVLMELPKYSLFELENGRRRMLASAKELQKGNQMVLPAHLVELLYHAKRYDESNNSESLEYVNEHRAQFDELLDYVIDFSEKYINADKNLEKIKKLYEENNEADIKELAKSFINLMTFTAMGAPADFKFFGENISRKRYTSIKELLNSTLIYQSITGLYETRIRLEKLGED

SEQ ID NO: 77 - protein, 1340 aa, Artificial Sequence
  1340 residue - joint ancestral sequence reconstruction method - node 74
MKKNYTIGLDIGTNSVGWAVIKDDYTLVRKKMKVLGNTDKKKIKKNFWGVRLFDEGETAEDTRLKRTTRRRYQRRRNRISYLQEIFQEPMSEVDENFFHRLDESFLVPEDKKYDRHPIFGTLEEEVAYHEQYPTIYHLRKHLADSSEKADLRLVYLALAHIIKYRGHFLIEGELNTENTSISETFEQFLDTYNEIFSEQELVDEITKVEEILTEKVSRSRKAEQVLALFPNEKRNGLFGQFLKLIVGNQGNFKKVFDLEDDIKLQLSEETYEEDLEALLGNIDDEYADVFLAAKNVYDAIELSGILSTDDNNTKAKLSAQMIELYDEHKKDLAQLKQFIKAHLPEKYYEIFKDSSKNGYAGYIDGKTSQEDFYKYIKKILKKTDNAEYFLEKIEQENFLRKQRSFYNGVIPHQIHLQELRAILDRQSKYYPFLKENRDKIESLLTFRIPYYVGPLAKGNSRFAWLERKSDEPIRPWNFDEIVDLEKSAERFIERMTNYDTYLPDEKVLPKRSLLYQKFTVFNELTKVRYIDERGKTQNFSSQEKIEIFDDLFKKKRKVTKKDLVNYLENEYQYIDSPDIKGIEDSFNASFSTYHDLSKIGVSKEFLDDEENEEILEDIIKILTIFEDRKMRKKQLEKYSDTLSEETLKKLERKHYTGWGRLSKKLINGIRDEQSNKTILDYLIDDDGSNRNFMQLINDDTLSFKEKIEKAQAIKETENIKEIVQDLPGSPAIKKGILQSLKIVDEIIEIMGYEPKNIVVEMARENQTTNRGKNNSKQRLKKLEEALKELDSNHVKEKPLDNEQLKNDRLYLYYLQNGKDMYTGQELDINNLSNYDIDHIIPQSFITDNSIDNRVLVSSTENRGKSDNVPSKEIVRKMKPFWQQLLRAGLISQRKFDNLTKAERGGLTEADRAHFINRQLVETRQITKHVANLLDQRFNTEKDEEGNTIRNINIVLLKSALTSQFRKKFGLYKVREINDYHHAHDAYLNAVVATTLLKVYPNLEPEFVYGEYRKNNMFKEDKATAKKHFYSNIMKFFSKEELINDENGEILWDKEKDLSTIKKVLSYKQMNIVKKVEKQKGRLYKETIHPKGNSNKLIPIKNNLDPKKYGGFNEPTVAYSVVITYDIEKGKKKKLKRVKEIVGIPIMDRKAFEKHPTAYLEKTGYNNPTENVLHELPKYSLFELENGSRRMIASAKELQKGNQMVLPAHLVELLYHAKRYDESNNSESLEYVNEHRAQFDELLDYVIDFSNKYINADKNLEKIKKLYEENNEADIKELVESFINLMTFTAMGAPADFKFFGENISRKRYTSIKELLGSTLIFQSITGLYETRIRLEKLGED

SEQ ID NO: 78 - protein, 1340 aa, Artificial Sequence
  1340 residue - joint ancestral sequence reconstruction method - node 75
MKKEYTIGLDIGTNSVGWAVITDDYDLVRKKMKVHGNTDKKKIKKNFWGVRLFDEGETAEDRRLKRTTRRRYTRRRNRISYLQEIFQEEMNKVDENFFHRLDESFLVPEDKKHDRHPIFGTLEEEVAYHEQYPTIYHLRKHLADSSEKADLRLVYLALAHIIKYRGHFLIEGELNTENTSVEETFKQFLQVYNQTFSEQEPVDETIDVEEILTEKVSRSRKAENVLKLFPNEKSNGMFAQFLKLIVGNQGNFKKVFDLEEDAKLQFSKETYEEDLEALLANIGDEYADVFLAAKNVYDAIELSGILSTTDNNTKAKLSASMIERYEEHKKDLAQLKQFIKEHLPEKYNEIFKDSSKNGYAGYIEGKTSQEDFYKYIKKILSKIDGAEYFLEKIEQENFLRKQRTFDNGVIPHQIHLEELRAIIDRQGKYYPFLKENQEKIESLLTFRIPYYVGPLAKGNSRFAWLIRKSDEPIRPWNFEEVVDLEKSATRFIERMTNYDTYLPNEKVLPKHSLLYQKFTVFNELTKVRYIDDRGKTQNFSSEEKQEIFDDLFKKNRKVTKKDLENYLKNEYQYIDSPTIKGIEDSFNASFSTYHDFLKIGVSKEVLDDEENEEMLEDIVKILTVFEDRKMIRKQLEKYSDVLDEEILKKLERRHYTGWGRLSAKLINGIRDKQSNKTILDYLIDDDGLNRNFMQLINDDNLSFKEEIEKAQAITETENLKEIVQDLPGSPAIKKGILQSLKIVDELVEIMGYEPKNIVVEMARENQTTSRGKRNSKQRLKRLEEALKELGSNLLKEHPVDNQALQNDRLYLYYLQNGKDMYTGQELDIHNLSNYDIDHIIPQSFITDNSIDNRVLVSSKENRGKSDNVPSKEVVKKMKPFWQKLYRAGLISQRKFDNLTKAERGGLTEDDKAGFINRQLVETRQITKHVANILHQRFNTEKDEEGNTIRNVKIITLKSALTSQFRKTFGLYKVREINDYHHAHDAYLNAVVATTLLKVYPQLEPEFVYGEYRKSNAFKENKATAKKQFYSNIMKFFSSEEPIIDENGEILWDKSKDIATIKKVLSYHQMNIVKKVEIQKGGFSKETIQPKGNSNKLIPRKNNWDPKKYGGFDSPNVAYSVVITYDIEKGKKKKLKRVKEIVGITIMERSAFEKNPIAYLENKGYQNPKENVLMKLPKYSLFELENGRRRMLASAKEAQKGNQMVLPAHLVTLLYHAKRYDESNNSESLEYVNEHRAQFDELLDHVIDFSEKYTLADKNLEKIKKLYEENNEADIKELAKSFINLMTFNAMGAPADFKFFGKNIPRKRYTSIKELLNATIIYQSITGLYETRRRLGKLGED

SEQ ID NO: 79 - protein, 1340 aa, Artificial Sequence
  1340 residue - joint ancestral sequence reconstruction method - node 76
MKKEYTIGLDIGTNSVGWAVITDDYDLVRKRMKIHGNTDKKKIKKNFWGVRLFDEGETAEDRRLKRTTRRRYTRRRNRISYLQEIFKDEMNKVDENFFHRLNESFLVPEDKKHDRHPIFGTLEEEVAYHEQYPTIYHLRKHLADSNEKADLRLVYLALAHIIKYRGHFLIEGELNTENTSVEETFKQFLQEYNQTFSEQEPVDEDIDVEEILTEKVSRSRKAENVLKLFPNEKSNGMFAQFLKLIVGNQGNFKKVFDLEEDAKLQFSKETYEEDLEALLANIGDEYADVFLAAKNVYDAIELSGILSTTDNNTKAKLSSSMIERYEEHKKDLAALKNFIKEHLPEKYNEIFKDSSKNGYAGYIEGKTSQEDFYKYIKKILSKIDGAEYFLKKIEQENFLRKQRTYDNGVIPHQIHLEELRAIIDRQGKYYPFLLENQEKIESLLTFRIPYYVGPLAKGNSRFAWLIRKSDEPIRPWNFEEVVDLENSATRFIERMTNYDTYLPNEKVLPKHSLLYQKFTVFNELTKVRYIDDRGKECNFSSEEKQEIFDNLFKKNRKVTKKDLENYLKNEYQYIDSPTIKGIEDNFNASFSTYHDFLKIGVSREVLDDEDNEEMLEDIVKILTVFEDRKMIRKQLEKYSDVLDEDILKKLERRHYTGWGRLSAKLINGIRDKQSNKTILDYLIDDDGLNRNFMQLINDDNLSFKEEIEKAQLITETENLKDIVQNLPGSPAIKKGILQSLKIVDELVEIMGYEPKNIVVEMARENQTTSRGKRNSKQRLKRLEEALKELGSDLLKEHPVDNQALQNDRLYLYYLQNGKDMYTGQELDIHNLSNYDIDHIIPQSFITDNSIDNRVLVSSKENRGKSDNVPSKEVVKKMKPFWQKLYRAGLISQRKFDNLTKAERGGLTEDDKAGFINRQLVETRQITKHVANILHQRFNTEKDEEGNTIRNVKIITLKSALTSQFRKTFGLYKVREINDYHHAHDAYLNAVVATTLLKVYPQLEPDFVYGEYRKSNAFKENKATAKKQFYSNIMEFFSSEEPIIDENGEILWDKSKDIATIKKVLSYHQMNIVKKVEIQTGGFSKETIQPKGNSNKLIPRKNNWDPKKYGGFDSPNVAYSIVITYDIEKGKKKKLKRVKEIVGITIMERSAFEKNPIAYLENKGYQNPKENVLMKLPKYSLFELENGRRRLLASAKEAQKGNQMVLPAHLVTLLYHAKRYIESNNAESLEYVNEHRHQFDELLDHVIDFSEKYTLADKNLEKIKKLYEENNEADIKELAKSFINLMTFNKMGAPADFKFFGKNIPRKRYTSIKELLNATIIYQSITGLYETRRKLGKLGED

SEQ ID NO: 80 - protein, 1340 aa, Artificial Sequence
  1340 residue - joint ancestral sequence reconstruction method node 77
MKKEYTIGLDIGTNSVGWAVITDDYDLVRKRMKINGNTDKKKIKKNFWGVRLFDEGETAEDRRLKRTTRRRLTRRRNRISYLQEIFKDEMNKVDENFFHRLNESFYVPEDKKHDRHPIFGTLEEEVAYHKQYPTIYHLRKHLADSNEKADLRLVYLALAHIIKYRGHFLIEGELNTENSSVEETFKEFLQEYNQTFSLQPPVDEDIDVEAILTEKVSRSRKAENVLNLFPTEKSNGMFHQFLKLIVGNQGNFKKVFDLEEDAKLQFSKETYEEDLEALLANIGDEYADVFLAAKNVYDAIELSGILSTTDNNTKAKLSSSMIERYEEHKKDLAALKNFIKEHLPEKYFEIFRDSSKNGYAGYIEGKTSEEDFYKYIKKILSKIDGAESFLKKIDQENFLRKQRTYDNGVIPHQIHLEELRAIIERQGKYYPFLLENQEKIESLLTFRIPYYVGPLAKGNSRFAWIERKSDEPIRPWNFEEVVDLENSATRFIEKMTNYDTYLPNEKVLPKHSLLYQKFTVFNELTKVRYIDDRGKECNFSSKEKQEIFDNLFKKNRKVSKKDLENYLKNEYQYIDSPTIKGIENNFNASFSTYHDFLKIGVSREVLDNEDYEEMLEDIVKILTVFEDRKMIRKQLEKYSDVLDEDILKKLERRHYTGWGRLSAKLINGIRDKQTQKTILDYLIDDDALNRNFMQLINDDNLSFKKEIEKAQLKTESENLKDIVDNLPGSPAIKKGILQSLKIVDELVEIMGYEPKNIVVEMARENQTTSQGKRNSKQRLKRIEEALKELGSDLLKEHPVDNQALQNDRLYLYYLQNGKDMYTGQELDIHNLSNYDIDHIIPQSFITDNSIDNRVLVSSKENRGKSDNVPSEEVVKKMKPFWQKLYRAGLISQRKFDNLTKAERGGLTEDDKAGFINRQLVETRQITKHVASILHQRFNTENDEEGNTIRNVKIITLKSALTSQFRKTFGLYKVREINDYHHAHDAYLNAVVATTLLKVYPQLEPDFVYGEYRKSNAFKENKATAKKQFYSNLMEFFSSEEPIIDENGEILWDKSKDIATIKKVLSYHQMNIVKKVEIQTGGFSKETIQPKGNSNKLIPRKNNWDPKKYGGFDSPNVAYSIVITHDIEKGKKKKLKRVKEIVGITIMERSIFEKNPIAYLENKGYVNPKENVLMKLPKYSLFELENGRRRLLASAKEAQKGNQMVLPAHLVTLLYHAKRYIESNNAESEEYVNEHRHQFDELLDHVINFSEKYTLADANLEKIKKLYEENNEAEIKELAKSFINLMTFNKMGAPADFKFFGKNIERKRYTSIKELLNATIIYQSITGLYETRRKLGKLGED

SEQ ID NO: 81 - protein, 1340 aa, Artificial Sequence
  1340 residue - joint ancestral sequence reconstruction method - node 78
MKKQYTIGLDIGTNSVGWAVISDDYDLIRKRMKINGDHDKGKMKKNFWGVRLFDEGETAEDRRIKRTTRRRLRRRRNRIHYLQSIFKDEMNKVDENFFHRLNESFYVPMDKEHDRHPIFGTLEEEVAYHKQFPTIYHLRKYLADSNEQADLRLVYLALAHIIKYRGHFLIEGELNTENSSVEETFKEFLHHYNQTFSLQPPISEDISVEAELTEKVSRSRKAENVLNKFGTEKSNGMFHQFLKLIVGNQGNFKKVFSLEEDRKLNISKETYEEDLEALLADIGEDYRELFLAAKNVHDAIELSGILSTTDDKTKASLSSSMIERYEEHKQDLSALKNFIKAHLPDRYFDIFRNSSKNGYAGYIEGKTSEEDFYKYLKKVLNKVDGAESFLKKIDEERFLRKQRTYDNGVIPHQIHLEELRAIIEKQGQYYPFLLENQEKIESLLTFRIPYYVGPLAKGQSKFAWIERKGDESIRPWNIEEEVDLVSSAERFIEKMTNYDTYLPNEKVLPKHSLLIQKFNVFNELTKVQYIDDQGKRCNFSSKEKQEIYDNLFKKNRTVSKKDLEDYLKNEYQYLDNPTIKGIENKFNASLKTYHDFLKIGVSREVLDNENYEERLEDIVKILTVFEDRKMIRKQLEKFSDVLDQDILKKLERRHYTGWGRLSAKLINGIRDEQTQKTILDYLIDDDAPNRNFMQLINDDDLSFKKTIEKARLKTESDNLKDIVDKIPGSPAIKKGILQSLKIVDEIVEIMGYEPESIVVEMARENQTTSQGQRNAKERLKRIEEALKELKSDLLKKHPVDQEALQNDRLYLYYLQNGKDMYTNQELDINNLSNYDIDHIIPRSFTTDNSIDNRVLVSSKENRGKSDDVPSEEVVKNMKPFWSSLYRSNLISKRKFDNLTKAERGGLTEDDKAGFIKRQLVETRQITKHVASILHQRYNTENDEEGNTIRNVKIITLKSALTSQFRKAFDLYKVREINDYHHAHDAYLNAVVATLLLKVYPQLEPDFVYGEYRKTNAFKENKATAKKQFYSNLIERFSSEEQIIDENGEIVWDKSKDIAKIKRVLSYHQMNIVKKVEIQTGNFSKETVQPKGNSNKLIPRKKDWDPKKYGGFDSPNVAYSIIFTHDIEKGKKKKLKRVKEIIGITIMDQSIFEADQIKYLENKGYVNPKENIKFKLPKYSLFELENGRRRLLASANEAQKGNQMVLPTHLVTLLYHCKRYIDSSNADHETYINENRHQFNELLDHVLNFSAQYTLADANEEKIKKLYEENNQAEVSELATSFINLMDFNKMGAPSAFKFFGTNIERKRYTSIKELLNATIIYQSITGLYETRKEVGKLGED

SEQ ID NO: 82 - protein, 1340 aa, Artificial Sequence
  1340 residue - joint ancestral sequence reconstruction method - node 79
MKKEYTIGLDIGTNSVGWAVLTDDYDLVKKKMKVHGNTEKKKIKKNFWGVRLFDEGETAEDRRLKRTTRRRYTRRRNRISYLQEIFQEEMNKVDENFFHRLDESFLVPEDKKHDRHPIFATLEEEVAYHEQYPTIYHLRKHLADSSEKADLRLVYLALAHIIKYRGHFLIEGELNTENTSVEETFKQFLQVYNQTFSEQEPVDETIDVEEILTEKVSRTRKAENVLKLFPNEKSNGMFAQFLKLIVGNQGNFKKVFDLEEDAKLQFSKETYEEDLEALLAKIGDEYADVFLAAKNVYDAIELSGILSTTDNNTKAKLSASMIERYEEHKKDLAQLKQFIKENLPEKYNEIFKDSSKNGYAGYIEGKTSQEDFYKYIKKILSKIDGAEYFLEKIEQENFLRKQRTFDNGVIPHQIHLEELRAIIDRQAKYYPFLKENQEKIESLLTFRIPYYVGPLAKGNSRFAWLIRKSDEPIRPWNFEEVVDLEKSATRFIERMTNYDTYLPNEKVLPKHSLLYQKFMVFNELTKVSYIDDRGKTQNFSSEEKQEIFDDLFKKNRKVTKKDLENFLRNEYNYIESATIKGIEDSFNASFSTYHDFLKIGVTQEVLDDPENEEMLEDIVKILTVFEDRKMIRKQLSKYSDVLDEEILKKLERRHYTGWGRLSAKLINGIRDKQSNKTILDYLINDDGLNRNFMQLINDDNLSFKEEIEKAQAITDTENLQEIVQDLPGSPAIKKGILQSLKIVDELVEIMGYEPKNIVVEMARENQTTSRGKRNSKPRLKALEEALKELGSNLLKEHPTDNQALQNDRLYLYYLQNGKDMYTGQELDIHNLSNYDIDHIIPQSFITDNSIDNRVLVSSKENRGKSDDVPSKEVVKKMKPFWEKLYRAGLISQRKFDNLTKAERGGLTEDDKAGFIQRQLVETRQITKHVANILHQRFNSEKDEEGNTIRKVRIITLKSALTSQFRKTFGLYKVREINDYHHAHDAYLNGVVATTLLKVYPQLEPEFVYGEYHKFNAFKENKATAKKQFYSNIMKFFASDEPIIDENGEILWDKSKNIATIKKVLSYHQMNIVKKVEIQKGGFSKETIQPKGNSNKLIPRKNNWDPKKYGGFDSPNVAYSVVITYDIEKGKKRKLKRVKEIVGITIMERSAFEKNPIAFLENKGYQNPKENVLMKLPKYTLFELENGRRRMLASAKEAQKGNQMVLPAHLVTLLYHAKHYDESNNSESLEYVNEHRAEFSEILDHVIDFAERYTLADKNLEKIKKLYEENQEADIKELAQSFVNLMQFNAMGAPADFKFFGKTIPRKRYTSIKELLNATIIYQSITGLYETRRRLGKLGED

SEQ ID NO: 83 - protein, 1340 aa, Artificial Sequence
  1340 residue - joint ancestral sequence reconstruction method -  node 80
MKKEYTIGLDIGTNSVGWAVLTDDYRLVAKKMKVHGNTEKKKIKKNFWGVRLFDEGQTAEARRSKRTTRRRLARRRNRILELQEIFAEEILKIDEHFFARLDESFLVPEDKKHTRHPIFATLEEEKSYHQQYPTIYHLRQHLADSSEKADIRLVYLALAHILKYRGHFLIEGELNTENTSVEETFKQFLQVYNQQFSEPEPVDETVDVAVILTEKLSKTKKAEKVLKYFPNEKSNGYFAQFLKLIVGNQGNFKKVFDLEEEAKLQFSKETYEEDLEELLEKIGDEYADVFLQAKNVYDAILLSEILSTTTKNTKAKLSAGMIERYEEHKKDLAQLKQFVKENLPEKYNEFFKDSSKNGYAGYIEGKTTQEDFYKFVKKELSGIDGSEPFLEKIEQENFLRKQRTFDNGVIPHQIHLTELRAIIDRQKKYYPFLKEAQEKIESLLTFRIPYYVGPLAKGQSPFAWLIRKSEEKIKPWNFEEVVDMEKSAMRFIERMTNYDTYLPNEKVLPKHSLLYQKFMIFNELTKVSYKDERGKTHYFSSEEKREIFDELFKKNRKVTKKDLQNFLYLNYNYIENAEIKGIEKAFNASYSTYHDFLKLAEMQEWLEDPEMESMFEDIVKILTVFEDREMIRTQLSKYEAVLGEEILKKLAKKHYTGWGRLSEKLIQGIRDKQSNKTILDYLINDDGFNRNFMQLINDDNLSFKEEIEKAQAITDTENLQEIVQDLPGSPAIKKGILQSLKIVDELVEIMGYEPKNIVVEMARENQTTSRGKRNSKPRLKALEEALKDFGSQLLKEHPTDNQALQKDRLYLYYLQNGKDMYTGEPLDIHRLSDYDIDHIIPRSFITDNSIDNKVLVSSKENRGKRDDVPSEKVVKKMRPFWEKLYRAKLISQRKFDNLTKIERGGLTEEDKAGFIQRQLVETRQITKHVANILHQRFNQKQEDEGKAIRKVRIITLKSALTSQFRKTFGIYKVREINDYHHAHDAYLNGVVAIALLKKYPQLAPEFVYGEYLKFNAHKENKATAKKEFYSNIMKFFESDEPICDENGEIFWDKSKNIAQIKKVISYHQMNIVKKVEIQKGGFSKETVQPKGNSNKLIPRKNNWDPSKYGGFGSPNVAYTVAFTYDIEKGKARKLKRAKAIEGITIMERSAFEQNPIAFLKNKGYENAKENVFMKLPKYTLFELENGRRRMVASHKEAQKANSFILPEHLVTLLYHAKHYDEISHKESFDYVNEHRSEFSEILDHVIDFAGRYTLADKNIEKIQKLYEENQEADIAELAQSFVNLMQFNAMGAPADFKFFDVTIPRKRYTSLTEIWDATIIYQSITGLYETRIRMGKLGEQ

SEQ ID NO: 84 - protein, 1340 aa, Artificial Sequence
  1340 residue - joint ancestral sequence reconstruction method - node 81
MKKEYTIGLDIGTNSVGWAVLTDDYRLVAKKMSVHGNTEKKKIKKNFWGARLFDEGQTAEARRSKRTTRRRLARRRNRILELQEIFAEEILKIDEHFFARLDESFLVPEDKKYTRFPIFATLEEEKSYHQQYPTIYHLRQHLADSTEKADIRLVYLALAHILKYRGHFLFEGELDTENTSVEETFKQFLQVYNQQFSEPEPVDETEGVAVILTEKLSKTKKVEKVLKYYPNEKSNGYFAQFLKLIVGNQGNFKKVFDLEEEAKLQFSKETYEEDLEELLEKIGDEYADVFLQAKNVYDAILLSEILSTTTKNTKAKLSAGMIERYEEHKKDLAKLKQFVKENLPEKYNEFFKDSSKNGYAGYIEGKTTQEDFYKFVKKELSGIDGSEPFLEKIDQENFLLKQRTFANGVIPHQIHLTELRAIIDRQKKYYPFLKEAQEKIESLLTFRIPYYVGPLAKGQSPFAWLERKSAEKITPWNFEEVVDMEKSAMRFIERMTNYDTYLPNEKVLPKHSLLYQKFMIFNELTKVSYKDERGKTHYFSSEEKREIFDELFKKHRKVTKKKLQNFLYLNYNYIENAEIKGIEKAFNASYSTYHDFLKLAEMQEWLEDPEMESMFEDIVKILTIFEDREMIRTQLSKYEAVLGEEILKKLAKKHYTGWGRLSEKLIQGIRDKQSNKTILDYLINDDDFNRNFMQLINDDHLSFKEEIAKALAISDTQSLLEVVQDLPGSPAIKKGIWQSLKIVEELVEIIGYNPKNIVVEMARENQKTSRGKRNSKPRLKALEEALKNFGSPLLKEHPTDNQALQKDRLYLYYLQNGKDMYTGEPLDIHRLSEYDIDHIIPRSFIVDNSIDNKVLVSSKENRGKRDDVPSEKVVKKMRPFWEKLQRAKLISQRKFANLTKIERGGLTEEDKARFIQRQLVETRQITKHVANILHQHFNQKQEDEGKASGKVRIITLKSTLTSQFRKTFGIYKVREINNHHHAHDAYLNGVVAIALLKKYPKLAPEFVYGNYIKFNLHKENKATAKKEFYSNIMKFFESDEPSCDENGEIFWDKSRNIAQIKKVISSHQVNIVKKVEIQKGGFYKETVNPKGNPDKLIPRKNNWDPSKYGGFGSPVVAYTVAFIYDIEKGKARKLKRAKAIEGITIMEQSAFEQDPIAFLKNKGYENVKENEFMKLPKYTLFELENGRRRMVASHKEAQKANSFILPEHLVTLLYHAKHYDEISHKESFDYVNEHRSEFSEILDHVIDFAGRYTLADKNIEKIQKLYEENQEADIAELAQSFVNLMQFNAMGAPADFKFFDVTIPRKRYTSLTEIWDATIIYQSITGLYETRIRMGNLGEQ

SEQ ID NO: 85 - protein, 1340 aa, Artificial Sequence
  1340 residue - joint ancestral sequence reconstruction method -  node 82
MTKDYTIGLDIGTNSVGWAVLTDDYRLMAKKMSVHGNTEKKKIKKNFWGARLFDEGQTAEARRSKRTTRRRLARRRNRILELQEIFAEEILKIDEHFFVRLDESFLVPEDKQYTRFPIFPTLEEEKSYYQQYPTIYHLRQKLADSTEKADIRLVYLALAHILKYRGHFLFEGELDTENTSVEETFKQFLEVYNQQFDQPEAVDETEGVAVILTEKLSKTKKVEKILKYYPTEKTNGYFAQFLKLIVGNQGNFKKVFDLEEEAKLQFSKETYEEDLESLLEKIGDEYADVFLQAKKVYDAILLSEILSTTTKNTKAKLSAGMIERYEEHKKDLAKLKQFVKENLPEKTTVFFKDSSKNGYAGYIEGKTTQEDFYKFVKKELSGIVGSEPFLEKIDQENFLLKQRTFANGVIPHQVHLTELKAIIDRQKQYYPFLEEAREKIISLLTFRIPYYVGPLAKGQSSFAWLERKTAEKITPWNFTEVVDMEKSAMRFIQRMTNYDTYLPTEKVLPKHSLLYQKYMIFNELTKVSYKDERGIKHYFSSEEKREIFKELFQKQRKVTVKKLQNFLYANYNYIENAEILGIEKAFNASYSTYHDFLKLAKMQEWLEQPEMESMFEDIVKILTIFEDREMIRTQLSKYQAVLGEEILKKLAKKHYTGWGRLSEKLIHGIRDKKTNKTILDYLINDDDFNRNFMQLINDDHLSFKEEIAKALALSDNQSLLEVVQDLPGSPAIKKGIWQSLKIVEELIEIIGYNPKNIVVEMARENQKTNRGKRNSKPRLKALEEALKNFGSPLLKEQPTDNQALQKDRLYLYYLQNGKDMYTGEPLDIDRLSEYDIDHIIPRSFIVDNSIDNKVLVSSKENRGKRDDVPSEKVVKKMRPFWEKLQRAKLISQRKFAYLTKIERGGLTPEDKARFIQRQLVETRQITKHVANILHQHFNQKQEDEGKASGKVRIITLKSTLTSQFRKTFGIYKVREINNHHHAHDAYLNGVVAIALLKKYPKLAPEFVYGNYIKFNLAKENKATAKKEFYSNILKFFESDEPSCDENGEIFWDKSRHIPQIKKVISSHQVNIVKKVEIQKGGFYKETVNPKGKPDKLIQRKNNWDVSKYGGFGSPVVAYAVAFIYDIEKGKARKLKKAKAIEGITIMEQSAFEQDPIAFLKNKGYSNVTENEFIKLPKYTLFELENGRRRMVASHKEAQKANSFILPEQLVTLLYHAQHYDEISHKESFDYVNEHLSEFSEILDQVIDFAGRYTLADKNIEKIQELYEENQEADTAELAQSFVNLMQFNAMGAPADFKFFDVTIPRKRYTSLTEIWDATIIYQSITGLYETRIRMGNLGEQ

SEQ ID NO: 86 - protein, 1340 aa, Artificial Sequence
  1340 residue - joint ancestral sequence reconstruction method - node 83
MKKEYTIGLDIGTNSVGWAVLTDDYDLVKKKMKVHGNTEKKKIKKNFWGVRLFDEGETAEDRRLKRTTRRRYTRRRNRISYLQEIFQEEMNKVDENFFHRLDESFLVPEDKKHDRHPIFATLEEEVAYHEQYPTIYHLRKHLADSSEKADLRLVYLALAHIIKYRGHFLIEGKLNTENTSVEETFKQFLQVYNQTFSEQEPVDETIDVEEILTEKVSRTRKAENVLKLFPNEKSNGMFAQFLKLIVGNQGNFKKVFDLEEDAKLQFSKETYEEDLEALLAKIGDEYADVFLAAKNVYDAVELSGILTVTDNNTKAKLSASMIERYEEHKKDLKQLKQFIRENLPEKYNEIFKDSSKNGYAGYIEGKTSQEDFYKYIKKILEKIDGAEYFLEKIEQENFLRKQRTFDNGVIPHQIHLEELRAIIHRQAKYYPFLKENQEKIESLLTFRIPYYVGPLANGNSRFAWLTRKSDEPIRPWNLEEVVDLGKSATAFIERMTNYDTYLPNEKVLPKHSLLYQKYMVFNELTKVSYIDDRGKTQNFSSEEKQQIFDDLFKQNRKVTKKDLENFLRNEYNYIESATIKGIEDSFNASFSTYHDFLKIGVTQEVLDDPENEEMLEDIVKILTVFEDRKMIREQLSKYSDVLDEEVLKKLERRHYTGWGRLSAKLINGIRDKQSNKTILDYLINDDGLNRNFMQLINDDNLSFKEEIEKAQASTNTEDLQEIVQDLAGSPAIKKGILQSLKIVDELVEIMGYPPKNIVVEMARENQTTSRGKRNSKPRLKALEEAMKELGSNLLKEHPTDNQALQNDRLYLYYLQNGKDMYTGQELDIHNLSNYDIDHIIPQSFITDNSIDNRVLVSSTENRGKSDDVPSKEVVKKMKAFWEKLYRAGLISQRKFDNLTKAERGGLTEDDKAGFIQRQLVETRQITKHVANILHQRFNSEKDEEGNTIRKVRIITLKSALTSQFRKTFGLYKVREINDYHHAHDAYLNGVVATTLLKVYPQLEPEFVYGEYHKFNAFKENKATAKKQFYSNIMKFFASDEPIIDENGEILWDKSKNIATIKKVLSYHQMNIVKKVEIQKGGFSKETIQPKGNSNKLIPRKNNWDPKKYGGFDSPNVAYSVVITYDIEKGKKRKLKRVKEIVGITIMERSAFEKNPIAFLENKGYQNPKENVLMKLPKYTLYELENGRRRMLASAKEAQKGNQMVLPAHLVTLLYHAKHCDESNNSESLEYVNEHRAEFSEILDHVIDFAERYTLADKNLEKIKKLYEENQEADIKEIAQSFVNLMQFNAMGAPADFKFFGKTIPRKRYTSIKELLNATIIYQSITGLYETRRRLGDLGED

SEQ ID NO: 87 - protein, 1340 aa, Artificial Sequence
  1340 residue - joint ancestral sequence reconstruction method -  node 84
MKKEYTIGLDIGTNSVGWAVLTEDYDLVKKKMKVHGNTEKKKIKKNFWGVRLFDEGETAEDRRLKRTTRRRYTRRRNRISYLQEIFQEEMNKVDENFFHRLDESFLVPEDKKHERHPIFATLEEEVAYHEQYPTIYHLRKHLADSSEKADLRLVYLALAHIIKYRGHFLIEGKLNTENTSVEETFKTFLQVYNQTFSEQEPVDETIDVEEIFTEKVSRARKAENVLKLFPNEKSNGTFAQFLKLIVGNQGNFKKTFDLEEDAKLQFSKEEYEEDLEALLAKIGDEYADVFAAAKNVYDAVELSGILTVTDNNTKAKLSASMIERYEEHKKDLKQLKQFIRKNLPEKYNEIFKDSSKNGYAGYIENSTSQEDFYKYIKKILEKIDGAEYFLEKIEQENFLRKQRTFDNGVIPHQIHLEELRAIIHRQAKYYPFLKENQEKIESLLTFRIPYYVGPLANGNSRFAWLSRKSDEPIRPWNLAEVVDLGKSATAFIERMTNYDTYLPNEKVLPKHSMLYEKYMVFNELTKVSYIDDRGKTQNFSSEEKQQIFDDLFKQNRKVTKKDLENFLRNEYNYIESATIKGIENSFNASFSTYHDFLKIGVTQEVLDDPENEEMLEEIVKILTVFEDRKMIREQLSKYSDVLDEEVLKKLERRHYTGWGRLSAKLINGIRDKQSNKTILDYLINDDGLNRNFMQLINDDNLSFKEEIEKAQAETNTEDLHEIVQDLAGSPAIKKGILQSLKIVDELVEIMGYPPKNIVVEMARENQTTSRGRRNSKPRLKALEEAMKELGSNLLKEHPTDNQALQNDRLYLYYLQNGKDMYTGQELDIHNLSNYDIDHIIPQSFITDNSIDNRVLVSSTENRGKSDDVPSKEVVKKMKAFWEKLYRSGLISQRKFDNLTKAERGGLTEDDKAGFIQRQLVETRQITKHVARILHQRFNSEKDEEGNTIRKVRIITLKSALTSQFRKTFGLYKVREINDYHHAHDAYLNGVVATTLLKVYPQLEPEFVYGEYHKFNAFKENKATAKKQFYSNIMKFFASDEPIIDENGEILWDKSKNIATVKKVMSYHQMNIVKKVEIQKGGFSKETIQPKGDSDKLISRKNNWDPKKYGGFDSPNVAYSVVITYDIEKGKKRKLKRVKEIVGITIMERSAFEKNPIEFLENKGYQNPKENVLMKLPKYTLYELENGRRRLLASAKEAQKGNQMVLPAHLVTLLYHAKHCDESNNSESLEYVNEHRAEFSEILDHVKDFAERYTLADKNLEKILKLYEENQEADIKEIAQSFVNLMQFNAMGAPADFKFFGKTIPRKRYTSIKELLNATIINQSITGLYETRRRLGDLGED

SEQ ID NO: 88 - protein, 1340 aa, Artificial Sequence
  1340 residue - joint ancestral sequence reconstruction method - node 85
MKKEYTIGLDIGTNSVGWAVLTENYDLVKKKMKVHGNTEKKKIKKNFWGVRLFDEGETAEDRRLKRTTRRRYTRRRNRISYLQEIFQEEMNKVDENFFHRLDESFLVPEEKKHERHPIFATLEEEVAYHEQFPTIYHLRKHLADSSEKADLRLVYLALAHIIKYRGHFLIEGKLNTENSSVEETFKTFLQVYNQTFSEQEPVDETIDVEELFTEKVSRARKAENVLKLFPNEKSNGTFAQFLKLIVGNQGNFKKTFDLEEDAKLQFSKEEYEEELEALLAIIGDEYADVFAAAKNVYDAVELSGILTVTDNNTKAKLSASMIERYEEHKKDLKQLKQFIRKELPEKYNEIFRDSSKNGYAGYIENSVSQADFYKYIKKILEKIPGAEYFLEKIEQENFLRKQRTFDNGVIPHQIHLEELRAIIHKQAKYYPFLKENQEKIEQLLTFRIPYYVGPLADGNSRFAWLSRKSDEPIRPWNLAEVVDLGKSATAFIERMTNYDTYLPNEKVLPKHSMLYEKYMVFNELTKVSYIDDRGKTQNFSSEEKKQIFDELFKQNRKVTKKLLENFLRNEYNYIESATIKGIENSFNASYGTYHDFLKIGVTQEVLDDPENEEMLEEIVKILTVFEDRKMIREQLSKYSDVFDEEVLKKLERRHYTGWGRLSAKLINGIRDKQSNKTILDYLINDDGLNRNLMQLINDDNLSFKEEIAKAQAETNTEDLHEIVQDLAGSPAIKKGILQSLKIVDELVEIMGYPPKNIVVEMARENQTTSRGRRNSKPRLKALEEAMKELGSNLLKEYPTDNQALQNDRLYLYYLQNGKDMYTGQELDIHNLSNYDIDHIIPQSFITDNSIDNRVLVSSTENRGKSDDVPSKEVVKKMIAFWEKLKRSGLISQRKFDNLTKALRGGLTEDDKAHFIQRQLVETRQITKHVARILHQRFNSEKDEEGNTIRTVRIITLKSALTSQFRKTFGLYKVREINDYHHAHDAYLNGVVATTLLKVYPQLEPEFVYGDYHKFNAFKENKATAKKQFYSNIMKFFASDEPIIDENGEILWDKSKNIATVKKVMSYHQMNIVKKVEIQTGGFSKETIQPKGDSDKLISRKTNWDPKKYGGFDSPNVAYSVVITYDIEKGKKRKLKRVKEIVGITIMERSAFEKNPVEFLENKGYQNPKENVLMKLPKYTLYELENGRRRLLASAKEAQKGNQMVLPAHLVTLLYHAKHCDESNNGKSLEYVNEHRAEFSEILDYVKDFAERYTLADKNLEKILKLYEENQEADIKEIAQSFVNLMQFNAMGAPADFKFFGKTIPRKRYTSIKELLNATIINQSITGLYETRRRLGDLGED

SEQ ID NO: 89 - protein, 1340 aa, Artificial Sequence
  1340 residue - joint ancestral sequence reconstruction method - node 86
MNKEYTIGLDIGTNSVGWAVLDENYDLVKKKMKIQGNGDKKKVKKNFWGVRLFDAGETAEGTRMKRTTRRRYTRRRNRISYLQEIFQGEMDKVDENFFHRLDDSFLVPEEKRNERHPIFATLEEEVAYHEQFPTIYHLRKHLADSTEKADLRLVYLALAHIIKYRGNFLIEGKLNTENSSVKETFKTFLQAYNQAFTVQEPVNETIDVGSLFQERVSRQRKAENVLKLFPNEKSNGTFMQFLKLIVGNQGNFKKTFGLEEDAKLQFSKEEYEEELEGLLAIVGDEYADVFAAAKNVYDAVELSGILTVKDINTKAKLSASLIKRYEEHKTDLEQLKKFVRKELPEKYYEVFRDSTKNGYAGYIENSVSQADFYKYLKKILEKIPGAEYFLEKIEQEDFLRKQRTFDNGVIPHQIHLEELRAIIRKQSRYYPFLKENQEKIEQILTFRIPYYVGPLADGNSRFAWLSRKTDGSIRPWNFTEVVDEGKSATAFIERMTNYDSYLPQEKVLPKHSMLYEKYMVFNELTKVSYIDDRGETQNFSSVEKKEIFDELFKKNRKVTYALLENFLKNQYMYIETAEIKGIEKSFNASYGTYHDLLKIGVSQEMLDDPENEEMFEEIVKILTVFEDRKMIKEQLSKYADYFEAGVLKKLVRRHYTGWGRLSAKLINGIRDKQSKKTILDYLMRDDDLNRNLMQLINDDNLSFKESIAQQQAEDQTEDLHEIVKELAGSPAIKKGILQSLKIVDEIVEIMGYPPTNIVVEMARENQTTSRGRKKSKPRQKVLEEAMKEFGSNLLKEYPPDNANLRNDRLFLYYLQNGKDMYTGKELDIHNLSNYDIDHIIPQSFIKDNSIDNMVLVSSTENRGKSDDVPSKEVVKKMIGFWEKLKRSGLISQRKFDNLTKALNGGLTEADKAHFIQRQLVETRQITKHVARILHQKYNSEDEDEGNTIRTTRIITLKSALTSQFRQIYQLYKVREINDYHHAHDAYLNGVVATTLLKVYPRLEPEFVYGDYQKFNLFKENKATAKKNFYSNLMRFFASDQPKVDENGEILWDQSKNIAMVKKVMSYHQMNIVKKTEIQTGGFSKESIQPKGDSAKLIARKTGWDPKKYGGFDSPNIAYSVVITYDIEKGKKRKLKRVKEIVGITIMERRQFEKNEVEFLENKGYQNPRENVLVKLPKYTLYELENGRRRLIASATEAQKGNQMVLPNHLVELLYHAKHCDDLNDGKSLAYLNAHRAEFNELFEYVKHFAERYTLADKNLKKLSKLYEQNQEADIKVMAQSFLNLMQFNAMGAPADFKFFDTTIPRKRYTSIKEILNATIINQSITGLYETHWKLGELGED

SEQ ID NO: 90 - protein, 1340 aa, Artificial Sequence
  1340 residue - joint ancestral sequence reconstruction method - node 87
MKKEYTIGLDIGTNSVGWAVLTDDYDLVKKKMKVHGNTEKKKIKKNFWGVRLFDEGETAEDRRLKRTTRRRITRRRNRISYLQEIFQEEMNKVDENFFHRLDESFLVPEDKKHDRHPIFATLEEEVAYHEQYPTIYHLRKKLADSSEKADLRLVYLALAHIIKYRGHFLIEGKLNTENTSVEETFKQFLQVYNQTFANGEPLDETIDVEEILTEKVSRTRKAEKVLKLFPNEKSNGMFAQFLKLIVGNKGNFKKVFDLEEDAKIQFAKESYEEDLEALLAKIGDEYADVFLAAKNVYDAVELSSILTVTDNNTKAKLSASMIERFEEHKKDLKQLKQFIRENLPEKYNEIFKDSQKDGYAGYIEGKTSQEDFYKYIKKILENIDGAEYFLEKIEQENFLRKQRTFDNGVIPHQIHLEELQAIIHRQAKYYPFLKENQEKIESLVTFRIPYYVGPLANGNSRFAWLTRKSDEPIRPWNLEEVVDLGKSATAFIERMTNYDTYLPNEKVLPKHSLLYQKYMVFNELTKVSYIDDRGKTQNFSGEEKQQIFDDLFKQKRKVKKKDLEQFLRNEYNYIESATIKGIEDSFNASFSTYHDLLKIGVTQEVLDDPENAEMLEDIVKILTVFEDRKMIREQLSKFSDVLDEEVLKKLERRHYTGWGRLSAKLINGIRDKQSNKTILDYLINDDGLNRNFMQLINDSNLSFKNEIEKAQASTNDEDLQEIVQDLAGSPAIKKGILQSLKIVDELVEIMGYPPKNIVVEMARENQTTSRGKRNSKPRLKALEKAMKELGSNLLKEHPTDNQALRNDRLYLYYLQNGKDMYTGQELDIHNLSNYDIDHIIPQSFITDNSIDNRVLVSSTENRGKSDDVPSKEVVKKMKAFWEKLYRAGLISQRKFDNLTKAERGGLTEDDKARFIQRQLVETRQITKNVANILHQRFNSEKDEEGNTIRKVRIITLKSALTSQFRKTFGLYKVREVNDYHHAHDAYLNGVVATTLLKVYPQLEPEFVYGEYHKFNAFKENKATAKKQFYTNIMKFFAKDEPIIDENGEILWDKSKYLATIKKVLSYHQMNIVKKVEIQKGGFSKETIKPKGNSNKLIPRKNNWDPKKYGGFDSPNVAYSVVITYDIEKGKKRKLKRVKEIVGITIMERTAFEKNPIAFLEEKGYQNPKENVLMKLPKYTLYELENGRRRMLASAKEAQKGNQMVLPAHLVTLLYHAKHCDESNNSESLAYVEEHRAEFSEILDHVIDFAERYTLADANLEKIKKLFEENQEADIKEIAQSFVNLMQFNAMGAPASFKFFEKTIERKRYTSIKELLNATIIYQSITGLYETRRRLGDLGED

SEQ ID NO: 91 - protein, 1340 aa, Artificial Sequence
  1340 residue - joint ancestral sequence reconstruction method - node 88
MKKPYTIGLDIGTNSVGWAVLTDQYDLVKRKMKVAGNSEKKQIKKNFWGVRLFDEGETAADRRMNRTTRRRIERRRNRISYLQEIFAEEMSKVDANFFYRLDDSFYVESEKRHSRHPFFATIEEEVAYHENYRTIYHLREKLVNSSEKADLRLVYLALAHIIKYRGNFLIEGKLDTKNTSVDEVFKQFIQTYNQVFASGIRLEENKDVAKILSEKVTRKEKLEKILKLYPGEKSTGMFAQFISLIVGSKGNFKKVFDLDEKTDIECAKDSYEEDLEALLAKIGDEYAEIFVAAKNAYNAVVLSSIITVTDTETKAKLSASMIERFDKHEKDLKQLKAFIKVHLPEKYNEIFNDVEKDGYAGYIDGKTKQEDFYKYMKKMLENIEGADYFIDKIEEENFLRKQRTFDNGAIPHQLHLEELEAILHQQAKYYPFLKENYEKIKSLVTFRIPYFVGPLANGQSEFAWLTRKADGEIRPWNIEEKVDFGKSAIDFIEKMTNKDTYLPKENVLPKHSLCYQKYMVYNELTKVRYIDDQGKTHYFSGQEKQQIFNDLFKQKRKVKKKDLEQFLRNMSNHIESPTIEGVEDSFNSSFATYHDLLKVGVTQEILDNPLNAEMLEDIVKILTVFEDKRMIKEQLQQFSDVLDGAVLKKLERRHYTGWGRLSAKLLIGIRDKQSHLTILDYLMNDDGLNRNLMQLINDSNLSFKSIIEKEQVSTADKDIQSIVADLAGSPAIKKGILQSLKIVDELVGIMGYPPQTIVVEMARENQTTGKGKNNSKPRFKSLEKAIKEFGSQILKEHPTDNQGLRNDRLYLYYLQNGKDMYTGQELDIHNLSNYDIDHIVPQSFITDNSIDNRVLVSSAANREKGDDVPSLEVVRKRKVFWEKLYQANLMSKRKFDYLTKAERGGLTEADKARFIHRQLVETRQITKNVANILHQRFNCEKDENGNTIEQVRIVTLKSALVSQFRKQFQLYKVREVNDYHHAHDAYLNGVVANTLLKVYPQLEPEFVYGDYHQFDWFKANKATAKKQFYTNIMLFFAKKDRIIDENGEILWDKSKYLDTIKKVLSYRQMNIVKKTEIQKGEFSKATIKPKGNSSKLIPRKANWDPMKYGGFDSPNMAYAVVIEYDIEKGKKKKLIKEKEIIRITIMERTAFEKDQKAFLEEKGYRNPKENVLTKLPKYTLYECENGRRRMLASANEAQKGNQMVLPNHLVTLLYHAKNCEASNDGKSLAYIESHREMFAELLAHVSEFAKRYTLADANLEKINQLFEQNKEGDIKVIAQSFVNLMAFNAMGAPASFKFFETTIERKRYNNLKELLNATIIYQSITGLYEARKRLDDLGED

SEQ ID NO: 92 - protein, 1340 aa, Artificial Sequence
  1340 residue - joint ancestral sequence reconstruction method - node 89
MKKPYTIGLDIGTNSVGWAVLTDQYDLVKRKMKVAGNSEKKQIKKNFWGVRLFDEGETAADRRMNRTARRRIERRRNRISYLQEIFAEEMSKIDANFFCRLNDSFYVDSEKRNSRHPFFATIEEEVAYHKNYRTIYHLREELVNSSEKADLRLVYLALAHIIKYRGNFLIEGALDTKNTSVDGVYKQFIQTYNQVFASGIKLEENKDVAKILAEKVTRKEKLERILKLYPGEKSTGMFAQFISLIVGSKGNFQKVFDLVEKTDIECAKDSYEEDLEALLAIIGDEYAELFVAAKNAYNAVVLSSIITVTDTETNAKLSASMIERFDTHEKDLSELKAFIKLHLPKQYEEIFSNVEKDGYAGYIDGKTKQADFYKYMKTMLENIEGADYFIAKIEEENFLRKQRTFDNGAIPHQLHLEELEAILHQQAKYYPFLKENYDKIKSLVTFRIPYFVGPLANGQSEFAWLTRKADGEIRPWNIEEKVDFGKSAVDFIEKMTNKDTYLPKENVLPKHSLCYQKYMVYNELTKVRYIDDQGKTNYFSGQEKQQIFNDLFKQKRKVKKKDLEQFLRNMSHHIESPTIEGLEDSFNSSYATYHDLLKVGIKQEILDNPLNTEMLEDIVKILTVFEDKRMIKEQLQQFSDVLDGAVLKKLERRHYTGWGRLSAKLLIGIRDKQSHLTILDYLMNDDGLNRNLMQLINDSNLSFKSIIEKEQVSTADKDIQSIVADLAGSPAIKKGILQSLKIVDELVSIMGYPPQTIVVEMARENQTTGKGKNNSRPRYKSLEKAIKEFGSQILKEHPTDNQELRNNRLYLYYLQNGKDMYTGQELDIHNLSNYDIDHIVPQSFITDNSIDNLVLTSSAGNREKGDDVPPLEIVRKRKVFWEKLYQGNLMSKRKFDYLTKAERGGLTEADKARFIHRQLVETRQITKNVANILHQRFNYEKDDHGNTMEQVRIVTLKSALVSQFRKQFQLYKVREVNDYHHAHDAYLNGVVANTLLKVYPQLEPEFVYGDYHQFDWFKANKATAKKQFYTNIMLFFAQKDRIIDENGEILWDKSKYLDTIKKVLSYRQMNIVKKTEIQKGEFSKATIKPKGNSSKLIPRKANWDPMKYGGLDSPNMAYAVVIEYDIAKGKKKKLVFEKKIIRITIMERKAFEKDEKAFLEEQGYRQPKENVLTKLPKYTLYECENGRRRMLASANEAQKGNQQVLPNHLVTLLHHAKNCEASNDGKSLDYIESNREMFAELLAHVSEFAKRYTLADANLNKINQLFEQNKEGDIKVIAQSFVNLMAFNAMGAPASFKFFETTIERKRYNNLKELLNATIIYQSITGLYEARKRLDDLGED

SEQ ID NO: 93 - protein, 1340 aa, Artificial Sequence
  1340 residue - joint ancestral sequence reconstruction method - node 90
MKKPYTIGLDIGTNSVGWAVLTDQYDLVKRKMKVAGNSEKKQIKKNFWGVRLFDEGETAADRRMNRTTRRRIERRRNRISYLQEIFAAEMSEVDANFFYRLEDSFYIESEKRHSRHPFFATIEEEVAYHENYRTIYHLREKLVNSSDKADLRLVYLALAHIIKYRGNFLIEGKLDTKNTSVDEVFKQFIQTYNQVFASDIRLEENKEVAKILSEKLTRREKLDKILKLYPGEKSTGMFAQFISLIIGSKGNFKKVFDLDEKTDIECAKDSYEEDLEALLAKIGDEYAEIFVAAKNAYNAVVLSSIITVTDTETKAKLSASMIERFDKHEKDLKRLKAFFKVHLPEKFNEVFNDVEKDGYAGYIDGKTKQEDFYKYMKKMLENIEGADYFIDQIEEENFLRKQRTFDNGAIPHQLHLEELEAILHQQAKYYPFLKEDYEKIKSLVTFRIPYFVGPLANGQSEFAWLTRKADGEIRPWNIEEKVDFGKSAIDFIEKMTNKDTYLPKENVLPKHSLCYQKYMVYNELTKIRYIDDQGKTHYFSGQEKQQIFNDLFKQKRKVKKKDLEQFLYNMMNHIESPTIEGVEDAFNSSFATYHDLQKVGVTQEILDNPLNAEMLEEIVKILTVFEDKRMIKEQLQQFSDVLDGAVLKKLERRHYTGWGRLSAKLLIGIRDKQSHLTILDYLMNDDGLNRNLMQLINDSNLSFKSIIEKEQVSTADKDIQSIVADLAGSPAIKKGILQSLKIVDELVGIMGYPPQTIVVEMARENQTTGKGKNNSKPRFTSLEKAIKEFGSQILKEHPTDNQGLKNDRLYLYYLQNGKDMYTGQELDIHNLSNYDIDHIVPQSFITDNSIDNRVLVSSAANREKGDNVPSLEVVRKRKVFWEKLYQAKLMSKRKFDYLTKAERGGLTEADKARFIHRQLVETRQITKNVANILHQRFNCKKDENGNTIEQVRIVTLKSALVSQFRKQFQLYKVREVNDYHHAHDAYLNGVVANTLLKVYPQLEPEFVYGDYHQFDWFKANKATAKKQFYTNIMLFFAKKDRIIDENGEILWDKSKYLDTIKKVLSYRQMNIVKKTEIQKGEFSNATVNPKGNSSKLIPRKADWDPIKYGGFDGSNMAYAIVIEYDIEKRKKKTVIKEKELIQINIMERTAFEKDQKAFLEEKGYRNPKENVLTKIPKYTLYECENGRRRMLGSANEAQKGNQMVLPNHLMTLLYHAKNCEASNDGKSLAYIESHREMFAELLAHISEFAKRYTLADANLEKINTLFEQNKEGDIKVIAQSFVNLMAFNAMGAPASFKFFETTIERKRYNNLKELLNATIIYQSITGLYEARKRLDDLGED

SEQ ID NO: 94 - protein, 1340 aa, Artificial Sequence
  1340 residue - joint ancestral sequence reconstruction method - node 91
MKKPYSIGLDIGTNSVGWAVITDDYKVPAKKMKVLGNTDKQSIKKNLLGALLFDSGETAEDTRLKRTARRRYTRRRNRICYLQEIFSEEMNKVDDSFFHRLDESFLVPEDKKHDRHPIFGNLAEEVAYHEQYPTIYHLRKHLADSSEKADLRLVYLALAHIIKFRGHFLIEGDLNAENTDVQKLFQQFVEVYNQTFEESHLSEETIDVEEILTEKISKSRRLENLIKLFPNEKKNGLFGNLLALILGLQPNFKTNFDLSEDAKLQFSKDTYEEDLENLLAQIGDEYADLFLAAKNLYDAILLSGILTVTDNNTKAPLSASMIKRYEEHQKDLAQLKQFIKEHLPEKYNEIFSDKSKNGYAGYIDGKTSQEDFYKYLKNILSKIDGAEYFLDKIDREDFLRKQRTFDNGSIPHQIHLEELHAILRRQGEYYPFLKENQEKIEKILTFRIPYYVGPLARGNSRFAWLTRKSDEAITPWNFDEVVDKEKSAEAFIERMTNYDTYLPNEKVLPKHSLLYETFTVYNELTKVKYVTERGKTRFFSAEQKQEIFDHLFKKNRKVTKKKLKDYLKKEFEEFDSVDITGIEDEFNASLGTYHDLLKILKDKDFLDDEENEDILEDIVLTLTLFEDREMIRKRLEKYSDIFTKEQLKKLERRHYTGWGRLSAKLINGIRDKQSGKTILDYLIDDGSSNRNFMQLINDDSLSFKEEIQKAQVIGETDNLKEVVQDLAGSPAIKKGILQSLKIVDELVKVMGHNPENIVVEMARENQTTNQGRRNSQQRLKRLEEALKNLGSNILKEHPVDNQQLQNDRLYLYYLQNGKDMYTGQELDIDNLSQYDIDHIIPQSFIKDDSIDNRVLTSSEENRGKSDNVPSIEVVRKMKSFWQKLLNAGLISQRKFDNLTKAERGGLTEDDKAGFIKRQLVETRQITKHVAQILDARFNTERDENDKRIRNVKIITLKSNLVSQFRKDFGLYKVREINDYHHAHDAYLNAVVGTALLKKYPKLEPEFVYGDYKKYNDRERGKATAKMFFYSNIMNFFKTEVKLADETGEIVWDKEKDFATVRKVLSYPQVNIVKKVEVQTGGFSKESILPKGNSDKLIPRKNNWDPKKYGGFDSPTVAYSVLVVADIEKGKAKKLKTVKELVGITIMERSAFEKNPIAFLEKKGYQNIQENLIIKLPKYSLFELENGRRRLLASAKELQKGNEMVLPAHLVTLLYHAKRIDKSNNSENLEYVEKHRNEFDELLDYIIDFSEKYILADKNLEKIKELYEENDDADINELASSFINLLTFTALGAPAAFKFFGENIDRKRYTSTKEVLNATLIHQSITGLYETRIDLSKLGED

SEQ ID NO: 95 - protein, 1340 aa, Artificial Sequence
  1340 residue - joint ancestral sequence reconstruction method - node 92
MKKPYSIGLDIGTNSVGWAVITDDYKVPAKKMKVLGNTDRQSIKKNLIGALLFDSGETAEATRLKRTARRRYTRRKNRICYLQEIFSNEMAKVDDSFFHRLEESFLVPEDKKHDRHPIFGNLADEVAYHENYPTIYHLRKKLADSSEKADLRLIYLALAHIIKFRGHFLIEGDLNAENTDVQKLFHQLVDTYNQLFEEDPLDTETIDAKAILTAKISKSRRLENLISLIPGQKKNGLFGNLIALSLGLTPNFKTNFDLSEDAKLQLSKDTYEEDLDNLLAQIGDQYADLFLAAKNLSDAILLSDILTVSDENTKAPLSASMIKRYEEHQQDLALLKQLVKEQLPEKYKEIFSDKSKNGYAGYIDGKTSQEEFYKYIKPILSKLDGAEEFLAKIDREDFLRKQRTFDNGSIPHQIHLEELHAILRRQEEYYPFLKDNQEKIEKILTFRIPYYVGPLARGNSRFAWLTRKSDEAITPWNFEEVVDKEASAQAFIERMTNFDTYLPNEKVLPKHSLLYETFTVYNELTKVKYVTEGMTKPFLSAEQKQAIVDLLFKKNRKVTVKQLKENYFKKIECFDSVDITGVEDRFNASLGTYHDLLKIIKDKDFLDNEENEDILEDIVLTLTLFEDREMIEKRLAKYADLFDKNVLKKLKRRHYTGWGRLSRKLINGIRDKQSGKTILDFLKADGFANRNFMQLINDDSLSFKEEIQKAQVIGQTDSLKEVVADLAGSPAIKKGILQTIKIVDELVKVMGHNPENIVIEMARENQTTNQGIKNSRQRMKRLEEVLKKLGSNILKEHPVDNTQLQNDRLYLYYLQNGKDMYTGQELDIDNLSQYDIDHIIPQSFIKDDSIDNKVLTSSEENRGKSDNVPSIEVVRKMKSYWQKLLNAGLISQRKFDNLTKAERGGLSESDKAGFIKRQLVETRQITKHVAQILDSRFNTERDENDKRIRNVKIITLKSKLVSDFRKDFGLYKVREINDYHHAHDAYLNAVVGTALLKKYPKLEPEFVYGDYKKYDDKERGKATAKMFFYSNIMNFFKTEVKLANETGEIVWDKEKDFATVRKVLSYPQVNIVKKTEVQTGGFSKESILPKGNSDKLIPRKNNWDPKKYGGFDSPTVAYSVLVVAKVEKGKAKKLKTVKELVGITIMERSAFEKNPIAFLEAKGYQDIQENLIIKLPKYSLFELENGRRRLLASAKELQKGNEMVLPAHLVTFLYHASRIDKSTSSENLEYVEQHRHEFDEILDYIIDFSERYILADKNLEKIKNLYNENDDSDINELASSFINLFTFTSLGAPAAFKFFDATIDRKRYTSTKEVLNATLIHQSITGLYETRIDLSQLGGD

SEQ ID NO: 96 - protein, 1340 aa, Artificial Sequence
  1340 residue - joint ancestral sequence reconstruction method - node 93
MKKPYSIGLDIGTNSVGWAVITDDYKVPAKKMKVLGNTDRQSIKKNLIGALLFDSGETAEATRLKRTARRRYTRRKNRICYLQEIFSNEMAKVDDSFFHRLEESFLVEEDKKHERHPIFGNLADEVAYHENYPTIYHLRKKLADSTEKADLRLIYLALAHIIKFRGHFLIEGDLNAENTDVQKLFHQLVDTYNQLFEEDPLDTETIDAKAILTAKISKSRRLENLISLIPGQKKNGLFGNLIALSLGLTPNFKSNFDLSEDAKLQLSKDTYDEDLDNLLAQIGDQYADLFLAAKNLSDAILLSDILTVNDENTKAPLSASMIKRYEEHQQDLALLKQLVKEQLPEKYKEIFSDKSKNGYAGYIDGKTSQEEFYKYIKPILEKLDGAEEFLAKINREDFLRKQRTFDNGSIPHQIHLGELHAILRRQEEYYPFLKDNQEKIEKILTFRIPYYVGPLARGNSRFAWLTRKSDEAITPWNFEEVVDKEASAQAFIERMTNFDEYLPNEKVLPKHSLLYEYFTVYNELTKVKYVTEGMTKPFLSAEQKQAIVDLLFKKNRKVTVKQLKEDYFKKIECFDSVDISGVEDRFNASLGTYHDLLKIIKDKDFLDNEENEDILEDIVLTLTLFEDREMIEKRLATYADLFDKNVLKQLKRRHYTGWGRLSRKLINGIRDKQSGKTILDFLKADGFANRNFMQLINDDSLSFKEEIQKAQVSGQTDSLKEQIADLAGSPAIKKGILQTIKIVDELVKVMGHNPENIVIEMARENQTTNQGIKNSRERMKRIEEVLKKLGSQILKEHPVENTQLQNERLYLYYLQNGKDMYTGQELDINNLSQYDIDHIIPQSFIKDDSIDNKVLTRSEENRGKSDNVPSIEVVKKMKSYWQKLLNAKLISQRKFDNLTKAERGGLSESDKAGFIKRQLVETRQITKHVAQILDSRFNTERDENDKPIRNVKVITLKSKLVSDFRKDFGLYKVREINDYHHAHDAYLNAVVGTALLKKYPKLESEFVYGDYKKYDDKERGKATAKMFFYSNIMNFFKTEVKLANETGEIVWDKEKDFATVRKVLSMPQVNIVKKTEVQTGGFSKESILPKGNSDKLIPRKNNWDPKKYGGFDSPTVAYSVLVVAKVEKGKAKKLKTVKELVGITIMERSAFEKNPIAFLEAKGYQDIQENLIIKLPKYSLFELENGRRRLLASATELQKGNEMVLPAHLVTFLYHASKIDKSTSSENLEYVEQHRHEFDEILDYIIDFSERYILADKNLEKIKNLFNENDDSDINELASSFINLFTFTSLGAPAAFKFLDATIDRKRYTSTKEVLNATLIHQSITGLYETRIDLSQLGGD

SEQ ID NO: 97 - protein, 1340 aa, Artificial Sequence
  1340 residue - joint ancestral sequence reconstruction method - node 94
MEKKYSIGLDIGTNSVGWAVITDDYKVPSKKFKVLGNTDRQSIKKNLIGALLFDSGETAEATRLKRTARRRYTRRKNRICYLQEIFSNEMAKVDDSFFHRLEESFLVEEDKKHERHPIFGNLADEVAYHENYPTIYHLRKKLADSTEKADLRLIYLALAHIIKFRGHFLIEGDLNAENSDVDKLFYQLVQTYNQLFEENPLDASGVDAKAILSARLSKSRRLENLIALLPGEKKNGLFGNLIALSLGLTPNFKSNFDLAEDAKLQLSKDTYDDDLDNLLAQIGDQYADLFLAAKNLSDAILLSDILRVNSEITKAPLSASMIKRYDEHHQDLALLKALVRQQLPEKYKEIFSDQSKNGYAGYIDGGASQEEFYKFIKPILEKMDGAEELLAKLNREDLLRKQRTFDNGSIPHQIHLGELHAILRRQEEFYPFLKDNREKIEKILTFRIPYYVGPLARGNSRFAWLTRKSEEAITPWNFEEVVDKGASAQSFIERMTNFDENLPNEKVLPKHSLLYEYFTVYNELTKVKYVTEGMRKPFLSGEQKKAIVDLLFKTNRKVTVKQLKEDYFKKIECFDSVEISGVEDRFNASLGTYHDLLKIIKDKDFLDNEENEDILEDIVLTLTLFEDREMIEERLKTYAHLFDDKVMKQLKRRHYTGWGRLSRKLINGIRDKQSGKTILDFLKSDGFANRNFMQLIHDDSLTFKEEIQKAQVSGQGDSLHEQIADLAGSPAIKKGILQTVKIVDELVKVMGHKPENIVIEMARENQTTNKGLKNSRERMKRIEEGIKELGSQILKEHPVENTQLQNEKLYLYYLQNGRDMYVDQELDINRLSDYDVDHIVPQSFIKDDSIDNKVLTRSDENRGKSDNVPSEEVVKKMKNYWRQLLNAKLITQRKFDNLTKAERGGLSESDKAGFIKRQLVETRQITKHVAQILDSRMNTKRDENDKPIREVKVITLKSKLVSDFRKDFQLYKVREINNYHHAHDAYLNAVVGTALIKKYPKLESEFVYGDYKVYDEQEIGKATAKRFFYSNIMNFFKTEVKLANETGEIVWDKEKDFATVRKVLSMPQVNIVKKTEVQTGGFSKESILPKRNSDKLIPRKKDWDPKKYGGFDSPTVAYSVLVVAKVEKGKAKKLKSVKELVGITIMERSSFEKNPIDFLEAKGYKDIQKDLIIKLPKYSLFELENGRRRMLASATELQKGNEMVLPAHLVTFLYHASKIEKSTSSENLAYVEQHRHEFDEILEYIIDFSERYILADKNLSKVKSLFNEHEDSDISELASSFINLFTFTSLGAPAAFKFLDTTIDRKRYTSTKEVLDATLIHQSITGLYETRIDLSQLGGD

SEQ ID NO: 98 - protein, 1340 aa, Artificial Sequence
  1340 residue - joint ancestral sequence reconstruction method - node 95
MDKKYSIGLDIGTNSVGWAVITDDYKVPSKKFKVLGNTDRHSIKKNLIGALLFDSGETAEATRLKRTARRRYTRRKNRICYLQEIFSNEMAKVDDSFFHRLEESFLVEEDKKHERHPIFGNIVDEVAYHEKYPTIYHLRKKLADSTDKADLRLIYLALAHMIKFRGHFLIEGDLNPDNSDVDKLFIQLVQTYNQLFEENPINASGVDAKAILSARLSKSRRLENLIAQLPGEKKNGLFGNLIALSLGLTPNFKSNFDLAEDAKLQLSKDTYDDDLDNLLAQIGDQYADLFLAAKNLSDAILLSDILRVNSEITKAPLSASMIKRYDEHHQDLTLLKALVRQQLPEKYKEIFFDQSKNGYAGYIDGGASQEEFYKFIKPILEKMDGTEELLAKLNREDLLRKQRTFDNGSIPHQIHLGELHAILRRQEDFYPFLKDNREKIEKILTFRIPYYVGPLARGNSRFAWMTRKSEETITPWNFEEVVDKGASAQSFIERMTNFDKNLPNEKVLPKHSLLYEYFTVYNELTKVKYVTEGMRKPFLSGEQKKAIVDLLFKTNRKVTVKQLKEDYFKKIECFDSVEISGVEDRFNASLGTYHDLLKIIKDKDFLDNEENEDILEDIVLTLTLFEDREMIEERLKTYAHLFDDKVMKQLKRRHYTGWGRLSRKLINGIRDKQSGKTILDFLKSDGFANRNFMQLIHDDSLTFKEEIQKAQVSGQGDSLHEQIANLAGSPAIKKGILQTVKVVDELVKVMGHKPENIVIEMARENQTTQKGQKNSRERMKRIEEGIKELGSQILKEHPVENTQLQNEKLYLYYLQNGRDMYVDQELDINRLSDYDVDHIVPQSFIKDDSIDNKVLTRSDKNRGKSDNVPSEEVVKKMKNYWRQLLNAKLITQRKFDNLTKAERGGLSELDKAGFIKRQLVETRQITKHVAQILDSRMNTKYDENDKLIREVKVITLKSKLVSDFRKDFQFYKVREINNYHHAHDAYLNAVVGTALIKKYPKLESEFVYGDYKVYDEQEIGKATAKRFFYSNIMNFFKTEITLANETGEIVWDKGRDFATVRKVLSMPQVNIVKKTEVQTGGFSKESILPKRNSDKLIARKKDWDPKKYGGFDSPTVAYSVLVVAKVEKGKAKKLKSVKELVGITIMERSSFEKNPIDFLEAKGYKDVQKDLIIKLPKYSLFELENGRRRMLASAGELQKGNEMVLPAKLVTFLYHASKIEKSKSPENNAYVEQHRHDLDEILEYISEFSKRYILADKNLSKVKSLFNKHEDSSISELASSIINLFTLTSLGAPAAFKFLDTTIDRKRYTSTKEVLDATLIHQSITGLYETRIDLSQLGGD

SEQ ID NO: 99 - protein, 1340 aa, Artificial Sequence
  1340 residue - joint ancestral sequence reconstruction method - node 96
MKKPYSIGLDIGTNSVGWAVITDDYKVPAKKMKVLGNTDRQTIKKNLIGALLFDSGETAEATRLKRTARRRYTRRKNRICYLQEIFSNEMAKVDDSFFQRLEESFLVPEDKEHDRHPIFGNLADEVAYHKNYPTIYHLRKKLADSSQKADLRLIYLALAHIIKFRGHFLIEGDLNSENTDVQKLFHQLVDTYNLLFEEDPLDTETIDAKAILTAKISKSRRLENLISLIPGQKKNGLFGNLIALSLGLTPNFKTNFGLSEDAKLQLSKDTYEEDLDNLLAQIGDQYADLFLAAKNLSDAILLSDILTVSDENTKAPLSASMIKRYEEHQQDLALLKQLVKEQLPEKYKEIFSDKSKNGYAGYIDGKTSQEEFYKYIKPILSKLDGAEEFLAKIDREDFLRKQRTFDNGSIPHQIHLEELHAILRRQEEYYPFLKDNQEKIEKLLTFRIPYYVGPLARGNSRFAWLKRKSDEAITPWNFEEVVDEEASAQAFIERMTNFDTYLPNEKVLPKHSLLYETFTVYNELTKVKYVTEGMTKPFLSAEQKQAIVDLLFKKNRKVTVKQLKENYFKKIECFDSVDITGVEDRFNASLGTYHDLLKIIKDKDFLDNEENQDILEDIVLTLTLFEDRKMIEKRLAKYADLFDKSVLKKLKRRHYTGWGRLSRKLINGIRDKQSGKTILDFLKADGFANRNFMQLINDSSLSFKEEIQKAQVIGKTESLKEVVANLAGSPAIKKGILQTIKIVDELVKVMGHNPENIVIEMARENQTTAQGIKNSRQRMKKLEEVLKKLGSNILKEHPVDNTQLQNDRLYLYYLQNGKDMYTGQDLDIDNLSQYDIDHIIPQSFIKDNSIDNKVLTSQEANRGKSDNVPSIEVVRKMKSYWQKLLKAGAISQRKFDNLTKAERGGLSESDKAGFIKRQLVETRQITKHVAQILDSRFNTELDENNKRIRNVKIITLKSKLVSDFRKDFGLYKVREINDYHHAHDAYLNAVVGTALLKKYPKLEPEFVYGDYKKYDDKERGKATAKMFFYSNIMNFFKTEVKLANETGEIVWDKEKDFATIRKVLSYPQVNIVKKTEVQTGGFSKESILPKGNSDKLIPRKNNWDPKKYGGFDSPTVAYSVLVVAKVEKGKAKKLKTVKELVGITIMERSAFEKNPIAFLEAKGYQDIQENLIIKLPKYSLFELENGRRRLLASAKELQKGNELVLPAHYVTFLYLASRYDKLTSSEDLHFVEQHLHYFDEILDIIIDFSERYILADSNLEKIKNLYNENDDFSINEQASNMINLFTFTSLGAPAAFKFFDATIDRKRYTSTKEVLNATLIHQSITGLYETRIDLSQLGGD

SEQ ID NO: 100 - protein, 1340 aa, Artificial Sequence
  1340 residue - joint ancestral sequence reconstruction method - node 97
MRKPYSIGLDIGTNSVGWAVITDDYKVPAKKMKVLGNTDRQTIKKNLIGALLFDSGETAEATRLKRTARRRYTRRKNRICYLQNIFSNEMAKVDDAFFQRLSESFLVPEDKEFDRHPIFGNLKDEVAYHKNYPTIYHLRKKLADSDQKADLRLIYLALAHIIKFRGHFLIEGDLNSENTDVQKLFLQLVDTYNLLFEEDPIDTETIDAKAILTAKTSKSRRLENLISEIPGQKKNGLFGNLIALSLGLTPNFKTNFGLSEDAKLQISKDTYEEDLDNLLAQIGDQYADLFLAAKNLSDAILLSDILTVSDENTKAPLSASMIKRYEEHQQDLALLKKLVKEQLPEKYKEIFSNKEKNGYAGYIDGKTSQEEFYKYIKPILSKLDGAEEFLAKIDREDFLRKQRTFDNGSIPHQIHLKELHAILRRQEKYYPFLKDNQEKIEKLLTFRIPYYVGPLAKGNSSFAWLKRRSDESITPWNFEEVVDEEASAQAFIERMTNFDTYLPEEKVLPKHSPLYEMFTVYNELTKVKYVTEGMTKPFLSAEQKEAIVDLLFKKNRKVTVKQLKENYFSKIECFDSVDITGVEDRFNASLGTYHDLLKIIKDKAFLDDEANQDILEDIVLTLTLFEDEKMIEKRLAKYADLFDKSVLKKLKKRHYTGWGRLSRKLINGIRDKQSGKTILDFLKADGFANRNFMQLINDSSLDFEKIIQNAQEKAKSESLKETVANLAGSPAIKKGILQSIKIVDEIVKVMGHNPDNIVIEMARENQTTAQGIKNSRQRLKKLEEVHKKTGSKILKEHSVSNTQLQNDRLYLYLLQDGKDMYTGQDLDIDNLSQYDIDHIIPQSFIKDNSIDNIVLTSQEANRGKSDNVPSIEVVRKMKSYWQKQLKSGAISQRKFDHLTKAERGGLSESDKAGFIKRQLVETRQITKHVAQILDSRFNSKLDENNKSNRNVKIITLKSKMVSDFRKDFGLYKLREVNDYHHAHDAYLNAVVGTALLKKYPKLEAEFVYGDYKHYDDSSLGKATAKMFFYSNIMNFFKKEVKLADETGEIVWDKVKDFKTIRKVLSYPQVNIVKKTEVQTGGFSKESILPKGNSDKLIPRKNNWDPKKYGGFDSPTIAYSVLVVAKVAKGKAQKLKTVKELVGITIMEQSEFEKDPIAFLEKKGYQDIQENLIIKLPKYSLFELENGRRRLLASAKELQKGNELALPAKYVKFLYLASRYDKLTKSEDRHFVEQHLHYFDEILDIIVDFSNRYILADSNLEKIKNLYNEKDDFSINEQASNMLNLFTFTSLGAPAAFKFFDATIDRKRYTSTNEVLNSTLIHQSITGLYETRIDLSKLGGD

SEQ ID NO: 101 - protein, 1340 aa, Artificial Sequence
  1340 residue - joint ancestral sequence reconstruction method - node 98
MRKPYSIGLDIGTNSVGWAVITDDYKVPAKKMKVLGNTDRQTIKKNLIGALLFDSGETAEATRLKRTARRRYTRRKNRIKYLQNIFSNEMSKVDSAFFQRLSESFLVPDDKEFDRHPIFGNLKDEVAYHKNYPTIYHLRKKLADSDQKADLRLIYLALAHIIKFRGHFLIEGDLDSENTDVHALFLKLVDTYNLLFEEDPIDTETIDAKAILTAKTSKSRRLENLIAEIPNQKKNTLFGNLISLSLGLTPNFKTNFELSEDAKLQISKDSYEEDLDNLLAQIGDQYADLFIAAKNLSDAILLSDILTVKGANTKAPLSASMVQRYEEHQQDLALLKKLVKEQLPEKYKEIFDNKEKNGYAGYIDGKTSQEEFYKYIKPILSKLDGAEKLISKLEREDFLRKQRTFDNGSIPHQIHLNELKAIIRRQEKYYPFLKDNQEKIEKLFTFRIPYYVGPLANGNSSFAWLKRRSNESITPWNFEEVVDQEASARAFIERMTNFDTYLPEEKVLPKHSPLYEMFTVYNELTKVKYQTEGMKKPFLSSEEKEEIVNLLFKKERKVTVKQLKENYFSKIKCFDSVTISGVEDRFNASLGTYHDLLKIIKDKAFLDDEANQDILEDIVLTLTLFEDEKMIEKRLAKYADVFDKSVLKKLKKRHYTGWGRLSQKLINGIRDKQTGKTILDFLKDDGVANRNFMQLINDSSLDFAKIIKNAQEKTKSESLEETIANLAGSPAIKKGILQSIKIVDEIVKVMGHNPDNIVIEMARENQSTAQGIKNSRQRLRKLEEVHKNTGSKILKEHNVSNTQLQSDRLYLYLLQDGKDMYTGKDLDFDNLSQYDIDHIIPQSFIKDNSIDNIVLTSQESNRGKSDNVPSIEIVNKMKSYWQKQLKSGAISQRKFDHLTKAERGGLSEFDKAGFIKRQLVETRQITKHVAQILDSRFNSNLDENSKSNRNVKIITLKSKMVSDFRKDFGFYKLREVNDYHHAHDAYLNAVVGTALLKKYPKLEAEFVYGDYKHYDDSSLGKATAKMFFYSNIMNFFKKEVKLADETGEIVWDKVKDIKTIRKVLSYPQVNIVKKTEVQTGGFSKESILPKGDSDKLIPRKNNWDPKKYGGFDSPIIAYSVLVVAKVAKGKAQKLKTVKELVGITIMEQNEFEKDPIAFLEKKGYQDIQESLIIKLPKYSLFELENGRKRLLASAKELQKGNELALPNKYVKFLYLASRYTKFTKEEDRHFVESHLHYFDEIMDIIVDFSNRYILADSNLEKIQNLYNEKDNFSIEEQATNMLNLFTFTGLGAPAAFKFFNADIDRKRYTSTNEILNSTLIHQSITGLYETRIDLSKLGGD

SEQ ID NO: 102 - protein, 1340 aa, Artificial Sequence
  1340 residue - joint ancestral sequence reconstruction method - node 99
MKKPYSIGLDIGTNSVGWAVITDDYKVPAKKMKVLGNTDKQSIKKNLLGALLFDSGETAEDTRLKRTARRRYTRRRNRIRYLQEIFSEEMNKVDDSFFHRLDESFLVPEDKRGDRHPIFGNLAEEVAYHEQFPTIYHLRKHLADSSEKADLRLVYLALAHMIKFRGHFLIEGDLNAENTDVQKLFQEFVEVYDQTFEESHLSEQTIDVEEILTEKISKSRRLENLIKLFPNEKKNGLFGNLLALILGLQPNFKTNFDLSEDAKLQFSKDTYEEDLENLLGQIGDEYADLFLAAKNLYDAILLSGILTVTDNSTKAPLSASMIKRYEEHQKDLAQLKQFIKENLPDKYNEIFSDKSKNGYAGYIDGKTSQEDFYKYLKNILSKIDGSEYFLDKIDREDFLRKQRTFDNGSIPHQIHLQEMHAILRRQGEYYPFLKENQEKIEKILTFRIPYYVGPLARGNSRFAWLTRKSDEKITPWNFDEVVDKEKSAEAFINRMTNYDLYLPDEKVLPKHSLLYETFTVYNELTKVKYVTEQGKTRFFDANMKQEIFDHLFKENRKVTKKKLLDYLKKEFEEFRIVDLTGLDKEFNASLGTYHDLLKILKDKDFLDDEENEDILEDIVLTLTLFEDREMIRKRLEKYSDIFTKEQLKKLERRHYTGWGRLSAKLINGIRDKQSGKTILDYLIDDGSSNRNFMQLINDDALSFKEEIQKAQVIGETDNLKQVVQDLAGSPAIKKGILQSLKIVDELVKVMGHNPENIVVEMARENQTTNQGRRNSQQRLKRLEDALKNLGSNILKEHPVDNQQLQNDRLFLYYLQNGKDMYTGEELDIDNLSQYDIDHIIPQAFIKDDSIDNRVLTSSAENRGKSDNVPSIEVVRKMKSFWQKLLNAGLISQRKFDNLTKAERGGLTEDDKAGFIKRQLVETRQITKHVAQILDARFNTERDENDKRIRNVKIITLKSNLVSQFRKEFELYKVREINDYHHAHDAYLNAVVGTALLKKYPKLEPEFVYGDYKKYNYRERGKATAKMFFYSNIMNFFKTEVKLADETGEIVWDKEKDFATVRKVLSYPQVNIVKKVEVQTGGFSKESILPKGNSDKLIPRKIYWDPKKYGGFDSPTVAYSVLVVADIEKGKAKKLKTVKELVGITIMERSAFEKNPVAFLEKKGYQNIQENKIIKLPKYSLFELENGRRRLLASAKELQKGNEMVLPAHLVTLLYHAKRIDKSNNPEHLEYVEKHRNEFKELLDYISDFSEKYILADKNLEKIKELYEENDDADINELASSFINLLTFTALGAPAAFKFFGENIDRKRYTSTKEVLNATLIHQSITGLYETRIDLSKLGED

SEQ ID NO: 103 - protein, 1340 aa, Artificial Sequence
  1340 residue - joint ancestral sequence reconstruction method - node 100
MKKPYSIGLDIGTNSVGWAVITDDYKVPAKKMKVLGNTDKQSIKKNLLGALLFDSGETAEATRLKRTARRRYTRRKNRLRYLQEIFSEEMNKVDDSFFHRLDESFLVPEDKRGDRHPIFGNIAEEVAYHQQFPTIYHLRKHLADSSEKADLRLVYLALAHMIKFRGHFLIEGDLNAENTDVQKLFADFVEVYDRTFEESHLSEITIDAEEILTEKISKSRRLENLIKHYPTEKKNTLFGNLIALALGLQPNFKTNFQLSEDAKLQFSKDTYEEDLEELLGKIGDEYADLFTAAKNLYDAILLSGILTVDDNSTKAPLSASMIKRYEEHQKDLAQLKEFIKENVPDQYNDIFKDKSKNGYAGYIENGVKQEDFYKYLKGILSKINGSEYFLDKIDREDFLRKQRTFDNGSIPHQIHLQEMHAILRRQGEYYPFLKENQEKIEKILTFRIPYYVGPLARKGSRFAWATYKSDEKITPWNFDEVVDKEKSAEKFITRMTSNDLYLPEEKVLPKHSLLYETFTVYNELTKVKYVNEQGKAKFFDANMKQEIFDHVFKENRKVTKEKLLNYLKKEFEEFRIVDLTGLDKEFNASLGTYHDLKKILKDKSFLDDEANEDIIEDIILTLTLFEDREMIRKRLEKYSDIFTKEQLKKLERRHYTGWGRLSYKLINGIRNKESGKTILDYLIDDGSANRNFMQLINDDALSFKEEIQKAQVIGEVDNLAQVVHDLAGSPAIKKGILQSVKIVDELVKVMGHNPENIVIEMARENQTTNRGRRNSQQRLKRLQDSLKNLGSNILKKKPVDNQQLQNDRLFLYYLQNGKDMYTGEELDIDNLSQYDIDHIIPQAFIKDDSIDNRVLTSSAENRGKSDNVPSIEVVRARKSFWVKLLKAGLISQRKFDNLTKAERGGLTEDDKAGFIKRQLVETRQITKHVAQILDARFNTERDENDKVIRNVKIITLKSNLVSQFRKEFELYKVREINDYHHAHDAYLNAVVGTALLKKYPKLAPEFVYGEYKKYNYRERGKATAKMFFYSNLMNFFKTEVKLADETGEIVWDKQKDFATVRKVLSYPQVNIVKKVEVQTGGFSKESILPKGDSDKLIPRKIYWDPKKYGGFDSPTVAYSVLVVADIEKGKAKKLKTVKELVGITIMERSAFEKNPVAFLEKKGYHNIQEDKIIKLPKYSLFELENGRRRLLASAKELQKGNEMVLPAHLVTLLYHAKRIDKSNNPEHLEYVEKHRNEFKELLDYISDFSEKYVLADKNLEKIKALYEENDDADIEEIASSFINLLTFTALGAPAAFKFFGENIDRKRYTSTKECLNATLIHQSITGLYETRIDLSKLGED

SEQ ID NO: 104 - protein, 1340 aa, Artificial Sequence
  1340 residue - joint ancestral sequence reconstruction method - node 101
MKKPYSIGLDIGTNSVGWAVITDDYKVPAKKMKVLGNTDKQSIKKNLLGALLFDSGETAEATRLKRTARRRYTRRKNRLRYLQEIFAEEMNKVDESFFQRLDESFLVDEDKRGDRHPIFGNIAEEVAYHQQFPTIYHLRKHLADSSEKADLRLVYLALAHMIKFRGHFLIEGDLNAENTDVQKLFADFVEVYDRTFEESHLSEITVDAASILTEKISKSRRLENLIKHYPTEKKNTLFGNLIALALGLQPNFKTNFQLSEDAKLQFSKDTYEEDLEELLGKIGDEYADLFTSAKNLYDAILLSGILTVDDNSTKAPLSASMIKRYEEHQKDLEKLKEFIKVNAPDQYNDIFKDKSKNGYAGYIENGVKQDEFYKYLKGILSKINGSEYFLDKIDREDFLRKQRTFDNGSIPHQIHLQEMHAILRRQGEYYPFLKENQEKIEKILTFRIPYYVGPLARKGSRFAWAEYKSDEKITPWNFDEVVDKEKSAEKFITRMTLNDLYLPEEKVLPKHSLLYETFTVYNELTKVKYVNEQGKAKFFDANMKQEIFDHVFKENRKVTKEKLLNYLNKEFEEFRIVDLTGLDKEFNASLGTYHDLKKILKDKSFLDDKANEQIIEDIILTLTLFEDREMIRKRLQKYSDIFTKEQLKKLERRHYTGWGRLSYKLINGIRNKENNKTILDYLIDDGSANRNFMQLINDDALSFKEEIQKAQVIGDVDDIAQVVHDLPGSPAIKKGILQSVKIVDELVKVMGHNPENIVIEMARENQTTNRGRRNSQQRLKRLQDSLKNLGSNINKKKPVENQQLQNDRLFLYYIQNGKDMYTGEELDIDNLSQYDIDHIIPQAFIKDDSIDNRVLTSSAENRGKSDNVPSIEVVRARKSFWVKLLKAGLISQRKFDNLTKAERGGLTEDDKAGFIKRQLVETRQITKHVAQILDARFNTERDENDKVIRNVKIITLKSNLVSQFRKEFELYKVREINDYHHAHDAYLNAVVGTALLKKYPKLAPEFVYGEYKKYNYRERGKATAKYFFYSNLMNFFKTEVKLADETGEIVWNKQKDFEIVRKVLSYPQVNIVKKVEVQTGGFSKESILPKGDSDKLIPRKIYWDPKKYGGFDSPTVAYSVLVVADIEKGKAKKLKTVKELVGITIMERSAFEKNPVAFLEKKGYHNIQEDKIIKLPKYSLFELENGRRRLLASAKELQKGNEMVLPAHLVTLLYHAKRIDKSNNPEHLEYVEKHRNEFKELLDYISDFSEKYVLADKNLEKIKALYEENDDASIEEIASSFINLLTFTALGAPAAFNFFGENIDRKRYTSTKECLNATLIHQSITGLYETRIDLSKLGED

SEQ ID NO: 105 - protein, 1340 aa, Artificial Sequence
  1340 residue - joint ancestral sequence reconstruction method - node 102
MNKPYSIGLDIGTNSVGWAVITDDYKVPAKKMKVLGNTDKQSIKKNLLGALLFDSGETAEATRLKRTARRRYTRRKNRLRYLQEIFAEEMNKVDESFFQRLDDSFLVDEDKRGERHPIFGNIAAEVKYHDEFPTIYHLRKHLADTSEKADLRLVYLALAHMIKFRGHFLIEGDLKAENTDVQALFKDFVEVYDKTIEESHLSEITVDALSILTEKVSKSRRLENLIAHYPTEKKNTLFGNLIALSLGLQPNFKTNFQLSEDAKLQFSKDTYEEDLEGLLGEVGDEYADLFASAKNLYDAILLSGILTVDDNSTKAPLSASMVKRYEEHQKDLKKLKDFIKVNAPDQYNAIFKDKNKKGYAGYIESGVKQDEFYKYLKGILLKINGSGDFLDKIDREDFLRKQRTFDNGSIPHQIHLQEMHAILRRQGEHYPFLKENQDKIEKILTFRIPYYVGPLARKGSRFAWAEYKADEKITPWNFDDILDKEKSAEKFITRMTLNDLYLPEEKVLPKHSLLYETFTVYNELTKVKYVNEQGEAKFFDANMKQEIFDHVFKENRKVTKDKLLNYLNKEFEEFRIVNLTGLDKEFNSSLGTYHDLRKILKDKSFLDDKANEQIIEDIIQTLTLFEDREMIRQRLQKYSDIFTKAQLKKLERRHYTGWGRLSYKLINGIRNKENKKTILDYLIDDGYANRNFMQLINDDALSFKEEIAKAQIIGDVDDIANVVHDLPGSPAIKKGILQSVKIVDELVKVMGHNPANIIIEMARENQTTDRGRRNSQQRLKLLQDSLKNLDNPVNIKNPVENQQLQNDRLFLYYIQNGKDMYTGETLDINNLSQYDIDHIIPQAFIKDDSLDNRVLTSSAENRGKSDNVPSIEVVRARKSFWVKLLKAGLISQRKFDNLTKAERGGLTEDDKAGFIKRQLVETRQITKHVAQILDARFNTEHDENKKVIRNVKIITLKSNLVSQFRKEFELYKVREINDYHHAHDAYLNAVVGTALLKKYPKLAPEFVYGEYKKYNYRERGKATAKYFFYSNLMNFFKKEVKLADEDGEIAWNKQKDFKIVRKVLSYPQVNIVKKTEVQTGGFSKESILPKGDSDKLIPRKSYWDPKKYGGFDSPTVAYSVLVVADIEKGKSKKLKTVQELVGITIMERSAFEKNPVAFLEKKGYRNIREDKIIKLPKYSLFELENGRRRLLASAKELQKGNELVIPQRFTTLLYHAKRIDKSNNPEHLEYVEKHRDEFKELLDYISDFSEKYVLADKNLEKIKALFAENDDASIEEIATSFISLLTFTALGAPAAFNFFGENIDRKRYTSTTECLNATLIHQSITGLYETRIDLSKLGED

SEQ ID NO: 106 - protein, 1340 aa, Artificial Sequence
  1340 residue - joint ancestral sequence reconstruction method - node 103
MKKSYSIGLDIGTNSVGWAVITDDYKVPAKKMKVLGNTDKKYIKKNLLGALLFDSGETAEATRLKRTARRRYTRRKNRLRYLQEIFAEEMAKVDESFFQRLDESFLTDDDKTFDSHPIFGNKAEEDAYHQKFPTIYHLRKHLADSSEKADLRLVYLALAHMIKFRGHFLIEGELNAENTDVQKLFADFVGVYDRTFDDSHLSEITVDAASILTEKISKSRRLENLIKHYPTEKKNTLFGNLIALALGLQPNFKTNFKLSEDAKLQFSKDTYEEDLEELLGKIGDDYADLFTSAKNLYDAILLSGILTVDDNSTKAPLSASMIKRYVEHHEDLEKLKEFIKVNKSELYHDIFKDKTKNGYAGYIENGVKQDEFYKYLKGILSKINGSDYFLDKIEREDFLRKQRTFDNGSIPHQIHLQEMHAILRRQGDYYPFLKENQEKIEKILTFRIPYYVGPLARKDSRFAWAEYRSDEKITPWNFDEVVDKEKSAEKFITRMTLNDLYLPEEKVLPKHSHVYETFAVYNELTKIKYVNEQGKSSFFDANMKQEIFDHVFKENRKVTKEKLLNYLNKEFEEFRIKDLIGLDKEFNASLGTYHDLKKILKDKSFLDDKTNEQIIEDIILTLTLFEDRDMIHERLQKYSDIFTKQQLKKLERRHYTGWGRLSYKLINGIRNKENNKTILDYLIDDGSANRNFMQLINDDALSFKQIIQEAQVVGDVDDIEAVVHDLPGSPAIKKGILQSVKIVDELVKVMGDNPDNIVIEMARENQTTNRGRSKSQQRLKRLQDSLKELGSNLNKKKPVENSHLQNDRLFLYYIQNGKDMYTGEELDIDHLSDYDIDHIIPQAFIKDDSIDNRVLTSSAKNRGKSDDVPSIEIVRARKSYWVKLYKSGLISKRKFDNLTKAERGGLTEADKAGFIKRQLVETRQITKHVAQILDARFNTERDENDKVIRDVKVITLKSNLVSQFRKEFKFYKVREINDYHHAHDAYLNAVVGTALLKKYPKLAPEFVYGEYKKYDHSEMGKATAKYFFYSNLMNFFKTEVKYADDTGEIVWNKQKDFEIVRKVLSYPQVNIVKKVEVQTGGFSKESILPKGDSDKLIPRKVYWDTKKYGGFDSPTVAYSVLVVADVEKGKAKKLKTVKELVGISIMERSFFEENPVAFLEKKGYHNVQEDKLIKLPKYSLFEFEGGRRRLLASATELQKGNEMVLPAHLVELLYHAHRIDNFNSTEHLKYVSEHKKEFEEVLSCVENFANLYVDVEKNLSKIRAAAESMDNFSIEEISSSFINLLTLTALGAPADFNFLGEKIPRKRYTSTKECLNATLIHQSITGLYETRIDLSKLGEE

SEQ ID NO: 107 - protein, 1340 aa, Artificial Sequence; identical to SEQ ID NO: 49
  1340 residue - joint ancestral sequence reconstruction method - node 104

SEQ ID NO: 108 - protein, 1340 aa, Artificial Sequence
  1340 residue - joint ancestral sequence reconstruction method - node 105
TKKNYSIGLDIGTNSVGWAVITDDYKVPAKKMKVLGNTDKKYIKKNLLGALLFDSGETAEATRLKRTARRRYTRRKNRLRYLQEIFAEEMAKVDESFFQRLDESFLTDDDKTFDSHPIFGNKAEEDAYHQKFPTIYHLRKHLADSSEKADLRLVYLALAHMIKFRGHFLIEGELNAENTDVQKLFADFVGVYDRTFDDSHLSEITVDAASILTEKISKSRRLENLIKHYPTEKKNTLFGNLIALALGLQPNFKTNFKLSEDAKLQFSKDTYEEDLEELLGKIGDDYADLFTSAKNLYDAILLSGILTVDDNSTKAPLSASMIKRYVEHHEDLEKLKEFIKANKSELYHDIFKDKTKNGYAGYIENGVKQDEFYKYLKGILSKINGSDYFLDKIEREDFLRKQRTFDNGSIPHQIHLQEMHAILRRQGDYYPFLKENQEKIEKILTFRIPYYVGPLARKDSRFAWAEYRSDEKITPWNFDKVIDKEKSAEKFITRMTLNDLYLPEEKVLPKHSHVYETFAVYNELTKIKYVNEQGKDSFFDSNMKQEIFDHVFKENRKVTKEKLLNYLNKEFPEYRIKDLIGLDKEFNASLGTYHDLKKILKDKSFLDDKVNEEVIEDIIKTLTLFEDRDMIHERLQKYSDIFTKQQLKKLERRHYTGWGRLSYKLINGIRNKENNKTILDYLIDDGSANRNFMQLINDDALSFKQIIQEAQVVGDVDDIEAVVHDLPGSPAIKKGILQSVKIVDELVKVMGDNPDNIVIEMARENQTTNRGRSQSQQRLKKLQNSLKELGSNLNEEKPVENSHLQNDQLFLYYIQNGKDMYTGDELDIDHLSDYDIDHIIPQAFIKDDSIDNRVLTSSAKNRGKSDDVPSLDIVRARKAEWVRLYKSGLISKRKFDNLTKAERGGLTEADKAGFIKRQLVETRQITKHVAQILDARFNTERDENDKVIRDVKVITLKSNLVSQFRKEFKFYKVREINDYHHAHDAYLNAVVGTALLKKYPKLAPEFVYGEYKKYDHSEMGKATAKYFFYSNLMNFFKTVVKYADDTGEIAWNKQTDFEKVRKVLSYPQVNIVKKVETQTGGFSKESILPKGDSDKLIPRKVYWDTKKYGGFDSPTVAYSVLVVADVEKGKAKKLKTVKELVGISIMERSFFEENPVEFLENKGYHNVQEDKLIKLPKYSLFEFEGGRRRLLASATELQKGNEMVLPAHLVELLYHAHRIDNFNSTEHLKYVSEHKKEFEEVLSCVENFANLYVDVEKNLSKIRAAADSMDNFSIEEISNSFINLLTLTALGAPADFNFLGEKIPRKRYTSTKECLNATLIHQSITGLYETRIDLSKLGEE

SEQ ID NO: 109 - protein, 1340 aa, Artificial Sequence; identical to SEQ ID NO: 51
  1340 residue - joint ancestral sequence reconstruction method - node 106

SEQ ID NO: 110 - protein, 1340 aa, Artificial Sequence
  1340 residue - joint ancestral sequence reconstruction method - node 107
MKKPYSIGLDIGTNSVGWAVITDDYKVPAKKMKVLGNTDKQYIKKNLLGALLFDSGNTAEDRRLKRTARRRYTRRRNRILYLQEIFSEEMNKVDDSFFHRLDDSFLVPEDKRGDRHPIFGNLAEEVAYHEQFPTIYHLRKHLADSSEKADLRLVYLALAHMIKFRGHFLIEGDLNAENTDVQKLFQEFVEVYDNTFEDSHLSEQNIDVEEILTEKISKSRRLERLLKLFPNEKKNGLFGNLLALILGLQPNFKTNFDLSEDAKLQFSKDTYEEDLENLLGQIGDEYADLFLAAKKLYDAILLSGILTVTDNSTKAPLSASMIKRYEEHQKDLAQLKQFIKQNLPDKYNEVFSDKSKDGYAGYIDGKTSQEDFYKYLKNLLSKIEGSEYFLDKIDREDFLRKQRTFDNGSIPHQIHLQEMHAILRRQGEYYPFLKENQEKIEKILTFRIPYYVGPLARGNSDFAWLTRKSDEKITPWNFDEVVDKESSAEAFINRMTNYDLYLPDEKVLPKHSLLYETFTVYNELTKVKYVTEQGKTRFFDANMKQEIFDHLFKENRKVTKKKLLDYLEKEFDEFRIVDLTGLDKEFNASLGTYHDLLKILKDKDFLDDEENEDILEDIVLTLTLFEDREMIRKRLEKYSDIFTKEQLKKLERRHYTGWGRLSAKLINGIRDKQSGKTILDYLIDDGSSNRNFMQLINDDALSFKEEIQKAQVIGETDNLKQVVQDLAGSPAIKKGILQSLKIVDELVKVMGHNPENIVVEMARENQTTNQGRRNSQQRLKRLEDALKNLGSNILKEHPVDNQQLQNDRLFLYYLQNGKDMYTGEELDIDNLSQYDIDHIIPQAFIKDDSIDNRVLTSSAENRGKSDNVPSIEVVRKMKSFWQKLLNAKLISQRKFDNLTKAERGGLTEDDKAGFIKRQLVETRQITKHVARILDARFNTELDENDKRIRNVKIITLKSNLVSQFRKEFELYKVREINDYHHAHDAYLNAVVATALLKKYPKLEPEFVYGDYPKYNYRERKKATAKMFFYSNIMNFFKTEVKLADETGEIVWDKEKDFATVRKVLSYPQVNIVKKVEEQTGGFSKESILPKGNSDKLIPRKIYWDPKKYGGFDSPTVAYSVLVVADIEKGKAKKLKTVKELVGITIMERSAFEKNPVAFLERKGYQNIQENKIIKLPKYSLFELENGRRRLLASAKELQKGNEMVLPAHLVTLLYHAKRIHKVNEPEHLEYVEKHRNEFKELLDYISDFSEKYILADKNLEKIKELYEENDDADINELASSFINLLTFTALGAPAAFKFFGKNIDRKRYTSTTEVLNATLIHQSITGLYETRIDLSKLGED

SEQ ID NO: 111 - protein, 1340 aa, Artificial Sequence
  1340 residue - joint ancestral sequence reconstruction method - node 108
MKKPYSIGLDIGTNSVGWAVITDDYKVPAKKMKVLGNTDKQYIKKNLLGALLFDSGNTAEDRRLKRTARRRYTRRRNRILYLQEIFSEEMNKVDDSFFHRLDDSFLVAEDKRGDRHPIFGNLAEEVAYHEQFPTIYHLRKHLADSSEKADLRLVYLALAHMIKFRGHFLIEGDLNAENTDVQKLFQEFVEVYDNTFEDSHLSEQNIDVEEILTEKISKSRRLERLLKLFPNEKKNGLFGNLLALILGLQPNFKTNFDLSEDAKLQFSKDTYEEDLENLLGQIGDEYADLFLAAKKLYDSILLSGILTVTDLSTKAPLSASMIQRYDEHQKDLAQLKQFIKQNLPDKYNEVFSDASKDGYAGYIDGKTSQEDFYKYLKNLLSKIEGSEYFLDKIDREDFLRKQRTFDNGSIPHQIHLQEMRAILRRQGEYYPFLKENQEKIEKILTFRIPYYVGPLARGNSDFAWLTRKSDEKITPWNFDEVVDKESSAEAFINRMTNYDLYLPDEKVLPKHSLLYEKFTVYNELTKVKYVTEQGKTRFFDANMKQEIFDGLFKENRKVTKKKLLDFLEKEFDEFRIVDLTGLDKEFNASYGTYHDLLKILKDKDFLDDSENEDILEDIVLTLTLFEDREMIRKRLEKYSDLFTKEQLKKLERRHYTGWGRLSAKLINGIRDKQSRKTILDYLIDDGSSNRNFMQLINDDALSFKEEIAKAQVIGETDNLKQVVQDLAGSPAIKKGILQSLKIVDELVKVMGHNPENIVVEMARENQTTNQGRRNSQQRLKRLEDAIKNLGSNILKEHPVDNQQLQNDRLFLYYLQNGRDMYTGEELDIDNLSQYDIDHIIPQAFIKDDSIDNRVLTSSAENRGKSDNVPSIDVVRKMKSFWSKLLNAKLISQRKFDNLTKAERGGLTEDDKAGFIKRQLVETRQITKHVARILDERFNTELDENDKRIRKVKIVTLKSNLVSNFRKEFELYKVREINDYHHAHDAYLNAVVAKALLKKYPKLEPEFVYGDYPKYNYRERKKATAKMFFYSNIMNFFKTEVKLADETGEIVWDKEKHFATVRKVLSYPQVNIVKKVEEQTGGFSKESILPKGNSDKLIPRKIYWDPKKYGGFDSPTVAYSVLVVADIEKGKAKKLKTVKELVGITIMERSAFEKNPVAFLERKGYQNIQENKIIKLPKYSLFELENGRRRLLASAKELQKGNEMVLPAHLVTLLYHAKRIHKVNEPEHLEYVEKHRNEFKELLDYISDFSEKYILADKNLEKIKELYEENDDADINELASSFINLLTFTALGAPAAFKFFDKNIDRKRYTSTTEVLNATLIHQSITGLYETRIDLSKLGED

SEQ ID NO: 112 - protein, 1340 aa, Artificial Sequence
  1340 residue - joint ancestral sequence reconstruction method - node 109
MKKPYSIGLDIGTNSVGWAVVTDDYKVPAKKMKVLGNTDKSHIKKNLLGALLFDSGNTAEDRRLKRTARRRYTRRRNRILYLQEIFSEEMGKVDDSFFHRLDDSFLVTEDKRGDRHPIFGNLAEEVAYHEKFPTIYHLRKHLADSTEKADLRLVYLALAHMIKFRGHFLIEGELNAENTDVQKLFQEFVGVYDNTFEDSHLSEQNVDVEEILTEKISKSRRLERLLKLFPNEKKNGLFGNLLALILGLQPNFKTNFELSEDAKLQFSKDTYEEELEVLLAQIGDNYAELFLSAKKLYDSILLSGILTVTDVSTKAPLSASMIQRYNEHQMDLAQLKQFIRQKLSDKYNEVFSDVSKDGYAGYIDGKTNQEAFYKYLKGLLNKIEGSGYFLDKIEREDFLRKQRTFDNGSIPHQIHLQEMRAIIRRQAEFYPFLADNQDRIEKILTFRIPYYVGPLARGKSDFAWLSRKSADKITPWNFDEIVDKESSAEAFINRMTNYDLYLPNQKVLPKHSLLYEKFTVYNELTKVKYKTEQGKTAFFDANMKQEIFDGVFKVYRKVTKDKLMDFLEKEFDEFRIVDLTGLDKEFNASYGTYHDLRKILKDKDFLDNSKNEKILEDIVLTLTLFEDREMIRKRLENYSDLLTKEQLKKLERRHYTGWGRLSAELIHGIRNKESRKTILDYLIDDGNSNRNFMQLINDDALSFKEEIAKAQVIGETDNLNQVVSDIAGSPAIKKGILQSLKIVDELVKIMGHQPENIVVEMARENQFTNQGRRNSQQRLKGLTDSIKEFGSQILKEHPVENSQLQNDRLFLYYLQNGRDMYTGEELDIDYLSQYDIDHIIPQAFIKDNSIDNRVLTSSKENRGKSDDVPSKDVVRKMKSYWSKLLSAKLITQRKFDNLTKAERGGLTDDDKAGFIKRQLVETRQITKHVARILDERFNTETDENNKKIRQVKIVTLKSNLVSNFRKEFELYKVREINDYHHAHDAYLNAVIGKALLGVYPQLEPEFVYGDYPHFHGHKENKATAKKFFYSNIMNFFKKDDVRTDKNGEIIWKKDEHISNIKKVLSYPQVNIVKKVEEQTGGFSKESILPKGNSDKLIPRKFYWDTKKYGGFDSPIVAYSILVIADIEKGKSKKLKTVKDLVGITIMERTTFEKNPVAFLERKGYRNVQEENIIKLPKYSLFELENGRRRLLASARELQKGNEIVLPNHLGTLLYHAKNIHKVDEPKHLDYVEKHKDEFKELLDVVSNFSKKYILAESNLEKIKELYAQNNNEDIKELASSFINLLTFTAIGAPAAFKFFDKNIDRKRYTSTTEILNATLIHQSITGLYETRIDLSKLGGD

SEQ ID NO: 113 - protein, 1340 aa, Artificial Sequence
  1340 residue - joint ancestral sequence reconstruction method - node 110
MKKPYSIGLDIGTNSVGWAVITDDYKVPAKKMKVLGNTDKEYIKKNLLGALLFDSGNTAEDRRLKRTARRRYTRRRNRILYLQEIFSEEMNKVDDSFFHRLDDSFLVAEDKRGDRHPIFGNLAEEVAYHEQFPTIYHLRKHLADSSEKADLRLVYLALAHMIKFRGHFLIEDDLDVRNTDVQKLFQEFLEVYDSTFEDSHLSEQNIDVEEILTEKISKSRKLERLLAQFPNQKKNGLFGNLLALILGLQPNFKTNFDLSEDAKLQFSKDSYDEDLENLLGQIGDEYADLFLAAKKLYDSILLSGILTVTDLSTKAPLSASMIQRYDEHQKDLAQLKQFIKANLPDKYKEVFSDASKDGYAGYIDGKTSQEDFYKYLKNLLSKVEGSEYFLEKIDREDFLRKQRTFDNGSIPHQVHLAEMKAILRRQGEYYPFLKENQEKIEKILTFRIPYYVGPLARGNSDFAWLTRKSDEKITPWNFDEVVDKESSAEAFINRMTNNDLYLPDEKVLPKHSLLYEKFTVYNELTKVKYVTEQGETRFFDANMKQEIFDGLFKENRKVTKKKLLDFLEKEFDEFRIVDITGLDKEFNASYGTYHDLLKILKDKDFLDDSENEDILEDIVLTLTLFEDREMIKKRLEKYSDLFTKEQLKKLSRRHYTGWGRLSAKLINGIRDKQSRKTILDYLIDDGRSNRNFMQLINDDALSFKEEIAKAQVIGDSDNLKQVVQDLAGSPAIKKGILQSLKIVDELVKVMGYNPEQIVVEMARENQTTNQGRRNSQQRLKRLEEAIKNLGSDILKEHPVDNQQLQNDRLFLYYLQNGRDMYTGETLDIDNLSQYDIDHIIPQAFIKDDSIDNRVLVSSAKNRGKSDNVPSIDVVKKMKSFWSKLLNAKLISQRKFDNLTKAERGGLTADDKAGFIKRQLVETRQITKHVARILDERFNTELDENDKRIRKVKIVTLKSNLVSNFRKEFEFYKVREINDYHHAHDAYLNAVVAKALLTKYPKLEPEFVYGDYPKYNYRERKSATEKMFFYSNIMNFFKTKVKLADETGEIVWDKEKHFATVRKVLSYPQVNIVKKVEEQTGGFSKESILPKGNSDKLIPRKIYLDPKKYGGFDSPTVAYSVLVVADIEKGKAKKLKTVKELLGITIMERSRFEKNPVAFLERKGYQNIQENKIIKLPKYSLFELENGRRRLLASAKELQKGNEMVLPAHLVKLLYHAKRINKVNEPEHIEYVEKHRNEFKDLLHYISDFSEKYILADKNLEKINELYEENEDASVNELASSFINLLTFTALGAPAAFKFFDKNIDRKRYTSTTEVLNATLIHQSITGLYETRIDLSKLGED

SEQ ID NO: 114 - protein, 1340 aa, Artificial Sequence
  1340 residue - joint ancestral sequence reconstruction method - node 111
MKKPYSIGLDIGTNSVGWAVITDDYKVPAKKMKVLGNTDKEYIKKNLLGALLFDSGNTAEDRRLKRTARRRYTRRRNRILYLQEIFSEEMNKVDESFFHRLDDSFLVAEDKRGDRHPIFGNIADEVKYHEQFPTIYHLRKHLADSSEKADLRLVYLALAHMIKFRGHFLIDDPLDVRNTDSQKLFQEFLEAYDSTQEDSHLSEQKIDISDIITEKISKSRKVEALLAQFPNQKKNSFFGNLVSLVFGLMPNFKTNFDLSEDAKLQFSKDSYDEDLENLLGQIGDEYADVFVAAKKLYDSILLSGILTVNDLSTKAPLSASMIQRYDEHNKDLAQLKDFIKANLPDVFKEVFSDASKNGYAGYIDGKTSQEDFYKYLKNLLGKVDGSEYFIEKIDREDFLRKQRTFDNGSIPHQVHLAEMKAILRRQGEYYPFLKENAEKIQQILTFRIPYYVGPLARGNSDFAWASFNSDEKITPWNFDEVIDKSSSAQAFIERMTNNDLYLPDEKVLPKHSLLYEKFTVYNELTKVKYVTETGEARFFDANLKQEIFDGLFKKNRKVTKKKLLDFLEKNFDEFRIVDITGLDKEFNASYGTYHDLLKILKDKEFMDDSENEDILEDIVLTLTLFEDREMIKQRLAKYADLFDKKVIDKLSRRHYTGWGRLSAKLINGIRDKQSRKTILDYLIDDGRSNRNFMQLINDDNLSFKDEIAKAQVIGDSDDLHQVVQDLAGSPAIKKGILQSLKIVDELVKVMGYNPEQIVVEMARENQTTARGRRNSQQRLKRLEEAIKNLGSDILKEHPVDNQQLQNDRLFLYYLQNGRDMYTGETLDIDNLSQYDIDHIIPQAFIKDDSIDNRVLVSSAKNRGKSDNVPSNDVVKRMKSFWSKLLNAKLISQRKFDNLTKAERGGLTADDKAGFIKRQLVETRQITKHVARILDERFNREFDENDKRIRKVKIVTLKSNLVSNFRKEFEFYKVREINDYHHAHDAYLNAVVAKALLTKYPKLEPEFVYGEYPKYNYRERKSATEKMFFYSNIMNMFKTKVKLADETGEIAWDKTKHFATVKKVLSYPQVNIVKKVEEQTGGFSKESILPKGNSDKLIARKNYLDTQKYGGFDSPTVAYSVLVVADIEKGKAKKLKTVKELLGITIMERSRFENNSVAFLERKGYQNIQENKIIKLPKYSLFELENGRRRLLASAKELQKGNEMVLPAHLVKLLYHAKHINSVNEPEHINYVEKHRNEFKDLLHYIRDFSEKYILADKNLEKINELFEENEEDSVNELASSFINLLTFTALGAPAAFKFFDKNIDRKRYTSTTEVLSATLIHQSITGLYETRIDLSKLGED

SEQ ID NO: 115 - protein, 1340 aa, Artificial Sequence
  1340 residue - joint ancestral sequence reconstruction method - node 112
MKKPYSIGLDIGTNSVGWAVITDDYKVPAKKMKVLGNTDKEYIKKNLLGALLFDSGETAEATRMKRTARRRYTRRRNRILYLQEIFSEEMNKVDESFFHRLDDSFLVAEDKRGERHPIFGNIADEVKYHEEFPTIYHLRKHLADSSEKADLRLVYLALAHIIKYRGHFLIDEPIDIRNTDSQKLFQEFLEAYDSIQEDSHLSEQKTDISDIITAKISKSRKVEALLAQFPNQKKNSFFGNLVSLVFGLMPNFKSNFDLSEDAKLQFSKDSYDEDLENLLGMIGDEYADVFVAAKKLYDSILLSGILTTNDLSTKAPLSASMIERYDEHNKDKQLLKDFIRANIGDVFKEVFYDASKNGYAGYIDGKTSQEDFYKYLKNLLGKVDGSEYFIEKIDREDFLRKQRTFDNGSIPHQVHLAEMKAILRRQGEFYPFLKENAEKIQQILTFRIPYYVGPLARGNSRFAWASFNSNEKITPWNFDDVIDKSSSAQAFIERMTNNDLYLPDEKVLPKHSLLYEKFTVYNELTKVKYVTETGEARFFDANLKKEIFDGLFKKNRKVTKKKLLDFLEKNFDEFRIVDITGLDNEFNASYGTYHDLLKILKDKEFMDDSENEDILEDIVLTLTLFEDREMIKQRLLKYEDLFDKKVIDKLSRRHYTGWGRLSAKLINGIKDKQSRKTILDYLIDDGHSNRNFMQLINDDNLSFKDEIAKAQVIGDGDDLHQVVQELAGSPAIKKGILQSLKIVDELVKVMGYNPEQIVVEMARENQTTARGRRNSQQRLGRLKEAIQDLGSDILKEHPVENNQLQNDRLYLYYLQNGRDMYTGETLDIDNLSQYDIDHIIPQAFIKDDSLDNRVLVSSAKNRGKSDNVPSNDVVKRMKSFWSKLLNAKLISQRKFDNLTKAERGGLSADDKAGFIKRQLVETRQITKHVARILDERFNREFDENDKRIRKVKIVTLKSNLVSNFRKEFEFYKVREINNYHHAHDAYLNAVVAKALLTRYPKLEPEFVYGEYPKYNYRERKSATEKMFFYSNIMNMFKTTIKLADETGEIAWDKTKHFATVKKVLSYPQVNIVKKVEEQTGGFSKESILPKGNSDKLIARKNYLNTQKYGGFDSPTVAYSVLFVADIEKGKSKKLKTVKEMIGITIMERSRFESNSVAFLEEKGYQNIRENTIIKLPKYSLFELENGRRRLLASAKELQKGNEMVLPAHLVKLLYHAKHINSVNKPEHINYVEKHRNEFTDLLHHIRDFSEKNILAAKNLEKINEAFEENEEDSVNELAQSFISLLTFTALGAPAAFKFFDKNIDRKRYTSTTEVLSATLIHQSITGLYETRIDLSKLGEE

SEQ ID NO: 116 - protein, 1340 aa, Artificial Sequence
  1340 residue - joint ancestral sequence reconstruction method - node 113
MKKPYSIGLDIGTNSVGWAVITDDYKVPSKKMKVLGNTDKRYIKKNLLGALLFDSGNTAEDRRLKRTARRRYTRRRNRILYLQEIFSEEMNKVDDSFFHRLDDSFLVPEDKRGSKHPIFGTLAEEKAYHKQFPTIYHLRKHLADSSEKADLRLVYLALAHMIKYRGHFLIEGDLNSENNDVQKLFQEFVEIYDNTFEGSHLSEQNADVEEILTEKISKSRRLERILKLFPNEKKNGLFGNFLALILGLQPNFKTNFDLSEDAKLQFSKDTYEEDLENLLGQIGDDYADLFLAAKKLYDAILLSGILTVTDNSTKAPLSASMIKRYEEHQKDLALLKQFIKQNLPDKYNEVFSDKSKDGYAGYIDGKTTQEDFYKYIKNLLSKIEGSDYFLDKIDREDFLRKQRTFDNGSIPHQIHLQEMHAILRRQGEYYPFLKENQEKIEKILTFRIPYYVGPLARGNSDFAWLTRKSDEKITPWNFDEVVDKESSAEAFINRMTNYDLYLPDEKVLPKHSLLYETFAVYNELTKVKFIAEGMRDYFLDSGQKKEIVNHLFKEKRKVTEKDIIDYLENEIDEYAGVELKGLEKQFNASLSTYHDLLKILKDKEFLDDEENEDILEDIVLTLTLFEDREMIRKRLEKYSDIFTEEQLKKLERRHYTGWGRLSAKLINGIRDKQTGKTILDYLIDDGTSNRNFMQLINDDALSFKEEIQKAQVIGETDNLKQVVQDLAGSPAIKKGILQSLKIVDELVKVMGHNPENIVVEMARENQTTNQGRRNSQQRYKRIEDALKNLGSNILKEHPTDNQQLQNDRLFLYYLQNGKDMYTGEELDIDQLSQYDIDHIIPQAFIKDDSIDNRVLTSSAENRGKSDNVPSIEVVRKRKSFWQQLLDSKLISQRKFDNLTKAERGGLTEEDKAGFIKRQLVETRQITKHVARILDARFNTELDENDKRIRNVKIITLKSNLVSQFRKEFELYKVREINDYHHAHDAYLNAVVATALLKKYPKLEPEFVYGDYPKYNYRERKKATEKVFFYSNIMNFFKKEVKYADETGEIVWDKEKDFATVRKVLSYPQVNIVKKVEEQTGGFSKESILPKGNSDKLIPRKIYLDPKKYGGFDSPTIAYSVLVIADIEKGKAKKLKTVKELVGITIMERAAFEKNPIAFLERKGYKNIQENNIIKLPKYSLFELENGRRRLLASAKELQKGNEMVLPAHLVTLLYHAKRIHKINEPIHLEYVEKHRNEFKELLNYISDFSEKYILADKNLEKIKELYEENDDADINELASSFINLLTFTALGAPAAFKFLGKNIDRKRYTSTTEILNATLIHQSITGLYETRIDLSKLGED

SEQ ID NO: 117 - protein, 1340 aa, Artificial Sequence
  1340 residue - joint ancestral sequence reconstruction method - node 114
MKKPYSIGLDIGTNSVGWAVITDDYKVPSKKMKVLGNTDKRYIKKNLLGALLFDSGTTAEDRRLKRTARRRYTRRRNRILYLQEIFSEEMSKVDDSFFHRLDDSFLVPEDKRGSKYPIFGTLAEEKAYHKQFPTIYHLRKHLADSSEKADLRLVYLALAHMIKYRGHFLIEGDFNSKNNDIQKIFQEFVEIYDNTFEGSHLSEQNAQVEEILTDKISKSAKRERILKLFPDEKNNGLFSEFLKLIVGNQADFKKHFDLEEKAPLQFSKDTYDEDLENLLGQIGDDYADLFLAAKKLYDAILLSGILTVTDNSTKAPLSASMIKRYEEHQKDLALLKQFIKNNLPEKYNEVFSDKSKDGYAGYIDGKTTQEDFYKYIKNLLSKFEGADYFLDKIDREDFLRKQRTFDNGSIPHQIHLQEMHAILRRQGEYYPFLKENKEKIEKILTFRIPYYVGPLARGNSDFAWLTRKSDEKITPWNFEEVVDKESSAEAFINRMTNYDLYLPEEKVLPKHSLLYETFAVYNELTKVKFIAEGMRDYFLDSGQKKEIVNHLFKEKRKVTEKDIIDYLHNEIDGYDGIELKGIEKQFNASLSTYHDLLKIIKDKEFLDDAKNEAILEDIVHTLTIFEDREMIKQRLAKYDNIFDEKVLKKLTRRHYTGWGKLSAKLINGIRDKQTGNTILDYLIDDGTSNRNFMQLINDDALSFKEEIQKAQVIGETDNVKQVVQDLPGSPAIKKGILQSIKIVDELVKVMGHNPESIVVEMARENQTTNQGKRNSQQRYKRIEDALKNLGSNILKENPTDNNQLQNDRLFLYYLQNGKDMYTGEELDIDQLSSYDIDHIIPQAFIKDDSIDNRVLTSSADNRGKSDNVPSIEVVRKRKSFWQQLLDSKLISQRKFDNLTKAERGGLTEEDKAGFIKRQLVETRQITKHVARILDARFNTELDENDKRIRTVKIITLKSNLVSQFRKEFELYKVREINDYHHAHDAYLNAVVATALLKKYPKLEPEFVYGDYPKYNYRERKKATEKVFFYSNIMNFFKKEVKYADETGEIVWNKEKDFATVRKVLSYPQVNIVKKVEEQTGGFSKESILPKGNSDKLIPRKIYLDPKKYGGFDSPTIAYSVLVIADIEKGKAKKLKTVKELVGITIMERAAFEKNPITFLEEKGYKNIQENNIIKLPKYSLFELENGRRRLLASAKELQKGNEIVLPAHLVTLLYHAKRIHKINEPIHLEYVEKHRNEFKELLNYISEFSEKYILADKNLEKIKSLYEENEDADIDELASSFINLLTFTALGAPAAFKFLGKNIDRKRYTSTSEILNATLIHQSITGLYETRIDLSKLGED

SEQ ID NO: 118 - protein, 1340 aa, Artificial Sequence
  1340 residue - joint ancestral sequence reconstruction method - node 115
MTKPYSIGLDIGTNSVGWAVITDDYKVPSKKMKVLGNTSKKYIKKNLLGALLFDSGITAEGRRLKRTARRRYTRRRNRILYLQEIFSTEMATLDDAFFQRLDDSFLVPDDKRDSKYPIFGNLVEEKAYHDEFPTIYHLRKYLADSTKKADLRLVYLALAHMIKYRGHFLIEGEFNSKNNDIQKNFQDFLDTYNAIFESDLSLENSKQLEEIVKDKISKSAKKDRILKLFPGEKNSGIFSEFLKLIVGNQADFKKYFNLDEKAPLHFSKESYDEDLETLLGYIGDDYSDVFLKAKKLYDAILLSGILTVTDNGTEAPLSSAMIMRYKEHEEDLALLKAYIRNISLETYNEVFKDNSKNGYAGYIDGKTSQEDFYVYLKNLLSNFEGADYFLEKIDREDFLRKQRTFDNGSIPYQIHLQEMRAILDKQAKFYPFLAKNKERIEKILTFRIPYYVGPLARGNSDFAWSIRKRNEKITPWNFEDVIDKESSAEAFINRMTSFDLYLPEEKVLPKHSLLYETFNVYNELTKVRFIAESMRDYFLDSKQKKDIVRLYFKDKRKVTDKDIIEYLHAEIDGYDGIELKGIEKQFNSSLSTYHDLLNIINDKEFLDDSSNEAIIEEIIHTLTIFEDREMIKQRLSKFENIFDKSVLKKLSRRHYTGWGKLSAKLINGIRDEKSGNTILDYLIDDGISNRNFMQLIHDDALSFKKKIQKAQIIGDKDNIKQVVQALPGSPAIKKGILQSIKIVDELVKVMGRKPESIVVEMARENQYTNQGKSNSQQRLKRLEESLKELGSKILKENIIDNNALQNDRLYLYYLQNGKDMYTGEELDIDRLSNYDIDHIIPQAFLKDNSIDNKVLVSSASNRGKSDDVPSLEVVKKRKTLWYQLLKSKLISQRKFDNLTKAERGGLSREDKAGFIQRQLVETRQITKHVARLLDERFNNKKDENNKTVRTVKIITLKSSLVSQFRKDFELYKVREINDFHHAHDAYLNAVVASALLKKYPKLEPEFVYGDYPKYNFRERKSATEKVYFYSNIMNIFKKSISLADETGESVWNKESDLATVRKVLSYPQVNIVKKVEEQNHGLDRKGLFNANLSSKPKPNSEYLDPKKYGGYAGISNSFAVLVKGTIEKGAKKKITNVLEFQGISILDRITYRKDKLNFLLEKGYKDIEENLIIELPKYSLFELSDGSRRMLASIGEIHKGNQIFLSQKFVKLLYHAKRISNTINENHRKYVENHKKEFEELFYYILEFNENYVGAKKNGELLKSAFQSWQNHSIDELCSSFIGLFELTSRGSAADFEFLGVKIPRYRYTPSSLLKDATLIHQSVTGLYETRIDLAKLGED

SEQ ID NO: 119 - protein, 1340 aa, Artificial Sequence
  1340 residue - joint ancestral sequence reconstruction method - node 116
MKKPYSIGLDIGTNSVGWAVITDDYKVPSKKMKVLGNTDKRFIKKNLIGALLFDEGTTAEDRRLKRTARRRYTRRKNRLRYLQEIFSEEMSKVDSSFFHRLDDSFLVPEDKRGSKYPIFATLAEEKEYHKQFPTIYHLRKHLADSKEKTDLRLIYLALAHMIKYRGHFLYEEAFDIKNNDIQKIFNEFISIYDNTFEGSSLSGQNAQVEAIFTDKISKSAKRERVLKLFPDEKSTGLFSEFLKLIVGNQADFKKHFDLEEKAPLQFSKDTYDEDLENLLGQIGDDFADLFLAAKKLYDAILLSGILTVTDPSTKAPLSASMIERYENHQKDLAALKQFIKNNLPEKYDEVFSDQSKDGYAGYIDGKTTQEAFYKYIKNLLSKFEGADYFLDKIEREDFLRKQRTFDNGSIPHQIHLQEMNAILRRQGEYYPFLKENKEKIEKILTFRIPYYVGPLARGNRDFAWLTRNSDEAIRPWNFEEIVDKASSAEDFINKMTNYDLYLPEEKVLPKHSLLYETFAVYNELTKVKFIAEGLRDYFLDSGQKKQIVNQLFKEKRKVTEKDIIHYLHNEVDGYDGIELKGIEKQFNASLSTYHDLLKIIKDKEFMDDAKNEAILENIVHTLTIFEDREMIKQRLAQYDSLFDEKVIKALTRRHYTGWGKLSAKLINGIRDKQTGNTILDYLIDDGKSNRNFMQLINDDGLSFKEIIQKAQVIGKTDDVKQVVQELPGSPAIKKGILQSIKIVDELVKVMGHNPESIVIEMARENQTTARGKKNSQQRYKRIEDALKNLASGILKENPTDNNQLQNDRLFLYYLQNGKDMYTGEALDINQLSSYDIDHIIPQAFIKDDSLDNRVLTSSKDNRGKSDNVPSIEVVQKRKAFWQQLLDSKLISERKFNNLTKAERGGLDERDKVGFIKRQLVETRQITKHVAQILDARFNTEVNEKDKKNRTVKIITLKSNLVSNFRKEFKLYKVREINDYHHAHDAYLNAVVAKAILKKYPKLEPEFVYGDYQKYDPKEVEKATEKYFFYSNLLNFFKEEVHYADDTGEIAWNKEKDFATIKKVLSLPQVNIVKKTEEQTGGFSKESILPKGNSDKLIPRKISLDPKKYGGFDSPTIAYSVLVIADIEKGKAKKLKTVKELVGITIMEKAAFEENPITFLEEKGYKNIRKNNIIKLPKYSLFELENGRRRLLASAKELQKGNEIVLPVHLTTLLYHAKRIHKINEPIHLEYVEKHRNEFKELLNLISEFSQKYILADNNLEKIKSLYEENEDADIDQLANSFINLLTFTALGAPAAFKFLGKDIDRKRYTSVSEILNATLIHQSITGLYETRIDLSKLGED

SEQ ID NO: 120 - protein, 1340 aa, Artificial Sequence
  1340 residue - joint ancestral sequence reconstruction method - node 117
MKKPYSIGLDIGTNSVGWAVITDDYKVPSKKMKVLGNTDKHFIKKNLIGALLFDEGTTAEDRRLKRTARRRYTRRKNRLRYLQEIFSEEMSKVDSSFFHRLDDSFLVPEDKRGSKYPIFATLAEEKEYHKKFPTIYHLRKHLADSKEKTDLRLIYLALAHMIKYRGHFLYEESFDIKNNDIQKIFNEFISIYDNTFEGSSLSGQNAQVEAIFTDKISKSAKRERVLKLFSDEKSTGLFSEFLKLIVGNQADFKKHFDLEEKAPLQFSKDTYDEDLENLLGQIGDDFADLFLVAKKLYDAILLSGILTVTDPSTKAPLSASMIERYENHQKDLAALKQFIKNNLPEKYDEVFSDQSKDGYAGYIDGKTTQEAFYKYIKNLLSKFEGADYFLDKIEREDFLRKQRTFDNGSIPHQIHLQEMNAILRRQGEHYPFLKENKEKIEKILTFRIPYYVGPLARGNRDFAWLTRNSDQAIRPWNFEEIVDKASSAEDFINKMTNYDLYLPEEKVLPKHSLLYETFAVYNELTKVKFIAEGLRDYFLDSGQKKQIVNQLFKEKRKVTEKDIIHYLHNEVDGYDGIELKGIEKQFNASLSTYHDLLKIIKDKEFMDDAKNEAILENIIHTLTIFEDREMIKQRLAQYDSLFDEKVIKALTRRHYTGWGKLSAKLINGIRDKQTGNTILDYLIDDGDSNRNFMQLINDDGLSFKEIIQKAQVVGKTDDVKQVVQELPGSPAIKKGILQSIKIVDELVKVMGHNPESIVIEMARENQTTARGKKNSQQRYKRIEDALKNLAPGILKENPTDNIQLQNDRLFLYYLQNGKDMYTGKALDINQLSSYDIDHIIPQAFIKDDSLDNRVLTSSKDNRGKSDNVPSIEVVQKRKAFWQQLLDSKLISERKFNNLTKAERGGLDERDKVGFIKRQLVETRQITKHVAQILDARFNTEVNEKDKKNRTVKIITLKSNLVSNFRKEFKLYKVREINDYHHAHDAYLNAVVAKAILKKYPKLEPEFVYGDYQKYDPKDVEKATEKYFFYSNLLNFFKEEVHYADDTGEIAWNKEKDFATIKKVLSLPQVNIVKKTEEQTGGLFDNNIVSKKDASKLIPIKSSLSPEKYGGYARPTIAYSVLVIADIEKGKAKKLKRIKEMVGITIQDKKKFEANPITYLEERGYKNINSNLIIKLPKYSLFEFNDGQRRLLASSIELQKGNELILPYHLTALLYHAQRINKINEPIHKQYVETHQNEFKELLTTIISLSKKYIQKPNVESLLQQAFEQNADKDIYQLSESFISLLKLTSFGAPGAFKFLGVEISQSRYKSVSQFLNATLIHQSITGLYETRIDLSKLGED

SEQ ID NO: 121 - protein, 1368 aa, Artificial Sequence
  1368 residue - marginal ancestral sequence reconstruction method - node 60
MKKDYSIGLDIGTNSVGWAVTDDNYNLVRKKMKVLGNTDKKSIGKALWGARLFDAAETAEERRMHRTTRRRYTRRRWRIDLLQEIFQEEISKVDPSFFIRLNESRLHPEDKTDDRHPLFGDNETEKDYHKQYPTIYHLRKHLMESDEKHDIRLVYLALHHIIKYRGHFLIEGDLNSENTDVEELFKQLVQVFNDTFEEEHLSEEAIDIEEILTDKKSRSTRAKEVVKLFGSEKKEACISALIKLIVGLKGNLKKVFGDAEDTAIHFSKDNYEEDVEAIRDIIPDEYADLFEAIKALYDAIVLSGILGGSTSNTKAKVSASMIARYEQHQKDLKQLKQFVKEHLPEKYNEIFSDNTKNGYSAYIEGGTSQEDFYKYLKKLLKELEEAEYLLEEIENENFLPKQRTSDNGVIPYQIHLEELRAILKNQGKYYPFLKENAEKIESILTFRIPYYVGPLARGNGRFAWMIRKKDGVITPWNFDEVVDKEKSAEEFIERMTNNCTYLPGENVLPKNSLLYEKFTVLNELNNVRLTIDKGKRRQRFSAEQKQEIFDDLFRKNRKVTKKKVEDYLKREYEEFDSADISGIDGEFKSSLGSYHDFCKIVVKANSLDEEDYKDIIEEIIKWLTVFEDRKMLRRRLEKYSEILTEEQIKKICKRHYTGWGRLSRKLLTGIRDKETGKSIIDVLRETDSSNRNFMQLLSDEDLSFKEEIEQANAEAEGENLHEIVEDLPGSPAIKRGINQALKIVDEIVKVMGGHEPKNIFVEMARENQKSARGRRSTKKRLKRLQEALKNLGSDLLKELLRDDNELRNDRLFLYYTQMGKCMYTGEPIDLDDLSNYDIDHIIPQSFIKDDSLDNRVLVSREENARKTDNFPSPEIRRKMKSFWQMLLKAGLISKKKFDRLTRADRGDFTDDELAGFIARQLVETRQITKHVATLLKQRYPTEKDEEDKTIRNAKIVSVKANLVSEFRQDFGLYKCREVNDYHHAHDAYLNAVVGNALLKRYPQLAAEFIKGDYRKNNLRKLIAKSAREENKANAKMHFYSNIMNSFTSDVKIADGTVIERPVIETNKETGEIVWDKEKDIATVRKVMNYHQVLITRKVEEETGGFFDQTILSKGNSKKLIPLKKNLDPEKYGGYNSPTVAYSVLVEYDIEKGKKKKLKTVKQLVGIPIRERAKLEKNPIKYLEKKGYQNPKVDLLIKIPKNSLFELDGGRRRILAAAKELKNANQLVLPAEEYTLLDKVAKIIKKNSNSESIAKKEEYVEEHLSEFDELLESLIDYSPKLALQDKNLEKLKEAFEQLNLADKKEVAKEIINLLHCTATTANAALKFLGGSKNRMRYTSTKELLNASLIHQSITGLYETRIDLGKLGED

SEQ ID NO: 122 - protein, 1368 aa, Artificial Sequence
  1368 residue - marginal ancestral sequence reconstruction method - node 61
MKKDYSIGLDIGTNSVGWAVTDDNYNLVRKKMKVLGNTDKKSIGKALLGARLFDAAETAEERRMHRTTRRRYTRRRWRLDLLQEIFQEEISKVDSSFFIRLKESRLHPEDKTDDRHPLFDDNETEKDYYKQYPTIYHLRKHLMENDEKHDIRLVYLALHHIIKYRGHFLIEGDLSSENTDVEELFKQLVQVLNDALEEEHLSEEANDIEEILTDKKSRSTRAKEVVKLFGSEKKEACISALVKAIVGLKGDLKKVFGEAEDTAIHFSKDDYEEDVEAIRDLIPDDSADLFEAIKALYDAIVLQGLLGDSTSNTKAKVSASMVARYEQHQKDLKLLKQFVKEHLSEKYNEFFSDNTNNGYSAYIEGGTSQEDFYKYLKKLLKELEDAEYLLEEIENENFLPKQRTSDNGVIPYQLHLEELRAILKNQGKYYPFLLEDAEKIESLLTFRIPYYVGPLARGNGRFAWMIRKKDGVITPWNFDEVVDKEKSAEEFIERMTGNCTYLPGETVLPKNSLLYEEFTVLNELNNVRLTIDKGKRRQRFSAEQKQEILDDLFRKNRKVTKKKVEDYLKREYENFDSADISGIDGEFKSSLGSYHDFCKIVVKADYLDEEDHKDIIEEIIKWLTVFEDRKMLKRRLEKYGEILTEEQIKKICKRHYTGWGRLSRKLLTGIRDAETGKSIIDVLRETDPSNRNFMQLLSDEDLGFKEEIDQLNAEAAGENLQDIVDDLPGSPAIKRGINQAIRIVDEIVKVMGGKEPSNIFVEMAREEQQSARGRRSTKRRLKRLQEALKNLGSDLLKELLRDDNDLRDDRLFLYYTQMGKCMYTGEPIDLDDLSKYDIDHIIPQSFIKDDSLDNRVLVSREENARKTDNLPSPEIRRKMKSFWQMLLKARLISKKKFDRLTRADRGDFTDDELAGFIARQLVETRQITKHVATLLEQRYPTEKDEEDKTIRNAKIVSVKANLVSEFRQDFGLYKCREVNDYHHAHDAYLNAVVGNVILKRYPSLAADYIRGDYRKNNLRKLIAKSAREENKANAKAHFYSSIMNSFTSDEKIADGTVIERPVIETNKETGEIVWDKEKDIATVRKVMNYRQVLITRKVEEETGAFFDQTIYSKGSSKKLIPLKKNLDPDKYGGYSSEKVAYSVLVEYDIEKRKAKKLKTVKQLVGIPIRERAKLEKNPSKYLEKKGYENPKVDLLIRIPKNQLLELDGGRRRILAAAKELKNATQLVLPAEEYTLLDKVAKIAKKNSNSESIAKKEEYVEEHLSEFDELLESLIDYSPKLALQDNNLEKLKEAFEQLNLADKKDVAKEIIGLLHCTATTANAALKSLGGSKNRMRYTSTKSLLNASLIHQSITGLFETRIDLGKLGED

SEQ ID NO: 123 - protein, 1368 aa, Artificial Sequence
  1368 residue - marginal ancestral sequence reconstruction method - node 62
TTDDYSIGLDMGTNSVGWAVTDSNGSMAHKKMPTLGNTDKKSIGKPTLGSRLFDAAETAAEARAHRGQRRRYVRRRWRLDLLQGLFQDEINKVDSEFFIRLRQSRLHVEDRADYRWPLFNDSDTEKDYYKRFPTIYHLRKWLMETDEKADIRLIYLAVHNIVKHRGNFLREKNLSSHNADPAEAVRHLRQALNDWLERGYLAENDSHILDILTDSERRSDQAKEIAKLFGTEQSDACNSALAKAIVGLKAELKNVFGEAEKTAIHLSSDDYEDDVEAIRDAIPDDSGELFQALCALYSAYVLQGLLSYAPGQTKAKISANMVAKYDQYGKDLKLLKNLARTYVSENYDAFFRGETYEGSSDYVQGYASYDDFQKSVKKLFKQLEDDRYMMKRFGEEKFLRRLKTSDNGSIYYQLHLEELRAILKNQGKHYPFLLEEEDKIESLVSFRIPYYVGPLSRENQRFAWSSRMKDAVITPWNWDEIIDRDKSAEEFILRMTGDCTYLQGEPVLPKCSLLYEEFCVLNELNGARWTIDEDDERQRFDAAQREGILHDLFRKTRKVTYKKVADWLEREYENFANAHVRGGQGEFESKLGSYIFFCKDVFKTDSLDEADYKPMIEQIILWNTLFEDRDILKRKIEAYGEHLTDEQIKVICKKRFTGWGRLSRKLLTGIKDADTGRSIIDVLREGNPNSRTFMEVLRDEDLGFQKKIDDFNKDYAGENLMDIVNDLPGSPAIRRSINQAIRIVDEIVSIAGKKEPSNIFIEVTREEDDPRKKGRRTKRRYEDIKNALENFKTDLWKELLKKDSNNLDERLSLYFMQRGKCMYSGRPIKLEELHKYEVDHIIPRSYIKDDSLENKVLVCREENQRKTDELLDPAIRRKMGDYWRMLHKAKLIGDKKFNNLFRRDRGDIDDKTLKGFVARQLVETSQMVKLVQTLLEARYPTEKDEEDKTIKNAKIVPVKANISHDLREAAGLVKCREANDFHHAHDAYLACRVGLFIQKRHPSVYANHVMRDYARKQLKKLIAKSAREYNKTHSMAHTKGFIVNSFMSSEFDKDGTIIEKPIIEINKETGEIFWDAEAEVEDIRRVLNYRQCFISRMPVEDTGAFWDQTIYSPRSNKKLLPLKRDLDPDKYGSYSREQFAYSVFFIYDIEARDAKKSKTVLQFAQVPVRVTAAIAKDPSKYASKLGQENLEFTRIIRILKKQLLELENGDRLIITGAKEVRNATEFAFSLEETTLVERCSQIAKEGSNPEDIASDEEYVEQLSSQLNELFSSLIERGPKLGVRLHAQLKLDQYLSQFDDAALRDKAKVIIGLISITNGATNTALSSLGGSKNRMRYTHNKLLNNASLIDQSVTGMFERRTHIGLLGED

SEQ ID NO: 124 - protein, 1368 aa, Artificial Sequence
  1368 residue - marginal ancestral sequence reconstruction method - node 63
MKKDYSIGLDIGTNSVGWAVTDDNYNLVRKKMKVLGNTDKKSIGKALWGVRLFDAAETAEERRMHRTTRRRYTRRRQRIDLLQEIFQEEISKVDPSFFIRLNESRLHPEDKTDDRHPLFGDNETDKDYHKQYPTIYHLRKHLMESDEKHDIRLVYLALHHIIKYRGHFLIEGDLNSENTDVEELFKQLVQVFNDTFEEEHLSEEAIDIEEILTDKKSRSTRAKEVVKLFGSEKKQACISALIKLIVGLKGNLKKVFGDAEDTSIHFSKDNYEEDLEAIRDIIPDEYADLFEAIKALYDAIVLSGILGGSTSNTKAKVSASMIARYEQHQKDLKQLKQFVKEHLPEKYNEIFSDNTKNGYSAYIEGGTSQEDFYKYLKKILKELEEAEYLLEEIENENFLPKQRTSDNGVIPYQIHLEELRAILKNQGKYYPFLKENAEKIESILTFRIPYYVGPLARGNGRFAWMIRKKDGKITPWNFDEVVDKEKSAEEFIERMTNNCTYLPGENVLPKNSLLYEKFTVLNELNNVRLTTDKGKTRQRFSAEQKQEIFDDLFRKNRKVTKKKLEDYLKREYEEFDSADISGIDGEFKSSLGSYHDFCKIVVKGNSLDEEDYKDIIEEIIKWLTVFEDRKMLRRRLEKYSEILTEEQIKKICKRHYTGWGRLSRKLLTGIRDKETGKSIIDVLRETDSSNRNFMQLLSDEDLSFKEEIEQANAEAEGENLHEIVEDLPGSPAIKRGILQALKIVDEIVKVMGGHEPKNIFVEMARENQKTGRGRRSTKKRLKRLQEALKNLGSNLLKELPRDDNELRNDRLFLYYTQMGKCMYTGEPIDLDDLSNYDIDHIIPQSFIKDDSLDNRVLVSREENARKSDNFPSPEIRRKMKSFWQMLLKAGLISKKKFDRLTRADRGDFTDDELAGFIARQLVETRQITKHVATLLKQRYPTEKDEEDKTIRNAKIVSVKANLVSEFRQDFGLYKCREVNDYHHAHDAYLNAVVGNALLKKYPQLAAEFIKGDYRKNNLRKLIAKSAREENKANAKMHFYSNIMNSFTSDVKIADGTVIERPVIETNKETGEIVWDKEKDIATVRKVMNYHQVLITRKVEEEKGGFFDQTILSKGNSKKLIPLKKNLDPEKYGGYNSPTVAYSVLVEYDIEKGKKKKLKTVKQLVGIPIRERAKLEKNPIKYLEKKGYQNPKVDLLIKIPKNSLFELDGGRRRILAAAKELKNANQLVLPAEEYTLLDKVAKIIKKNSNSESIAKKEEYVEEHLSEFDELLESLIDYSPKLALQDKNLEKIKEAFEQLNLADKKEVAKEIINLLHCTATTANAALKFLGGSKNRMRYTSIKELLNASLIHQSITGLYETRIDLGKLGED

SEQ ID NO: 125 - protein, 1368 aa, Artificial Sequence
  Sequence1368 residue - marginal ancestral sequence reconstruction method -  node 64
MKKEYYIGLDMGTNSVGWAVTDENYNLCKRHMKVLGNTDGKSKGKAMWGVRLFDTAETAEERRMYRTSRRRLQRRKQRIELLQEIFSEEISKVDPTFFIRLNESRLHPEDKTEDRYPLFVDNETDKDYHKQYPTIYHLRKELMENDEPHDIRLVYLALHHIIKHRGHFLIEGDLDSENTDLSEVFKELVKVFNDELEIELLSEEALQIEEILTDKKSKSAKAKEIAKLFGSEKKQACIKALVKLIVGLTGNLSEIFGDSEETSINFSESNYEENMEAIEEILPDEFSELIEAIKALYDWAVLVDILGGSTYISEAKVKASMIARYEKHRKDLQQLKNLVKTHCPEEYKEIFSSDKKNGYSAYIKNGCSQEDFYKYLKKILEELEKAEYLLEEIENETFLPKQRSKDNGVIPYQVHLQELKKILKNAGEYLPFLKENAEKIESIFKFRIPYYVGPLSRGNGSNAWMIRKEDGKIYPWNFDDVVDVEKSAEEFIERMTNKCTYLPGEDVLPKNSLLYSKFMVLNELNNLRIDGEKIKKRQRFSVELKQEIYNDLFCRNRKVTGKKIKDYLKREYNEIDEADISGIDGDFKSSLRSYHDFKKIVGKGNSLDEEDYKEIIEEIIKWITIFDDKKMLKRRLKKYPEILSEEQIKKICKLKYTGWGRLSREFLTGVRDKETGESIINALWETDSSNDNLMQLLSNKDYSFKEEIEQINAEAAGENSYETVEDLYVSPAVKRAIWQTLQIVEEIVKVMGGHEPKRIFVEMAREKEKNGKGRTSRKKRLKELYKSCKNDASDLLKELGRDDNELRSDKLFLYYTQMGKCMYSGEPIDLDDLFKYDIDHIYPQSKIKDDSLDNRVLVRKEVNAKKSDNFPSPEIREKMKPFWQMLLKKGFISKKKYDRLTRTTRGEFTDDELAGFIARQLVETRQSTKAVAELLKQLYPTEKDEEDKTIRDSEIVYVKANLVSEFRQDFDLIKCREVNDYHHAKDAYLNIVVGNVYHVKYTNNAAKFIKGNRGRNYLRKLIAKSAREENKANAKMHFYSNIKKMFTSDVKSADGTVIERPVIETNKKNGEIVWDKDKSIATVRKIMNKNNILYTRYTYEEKGGLFNQTILKKGNSQKLIPLKKNLDPEKYGGYNSPTAAYFALVEYDIEEGKKRKRKTTKQLVAIPIYEKAKLEENPIKYLEERGLKNPAVDLLIKIKKNSLFEMDGFRMRLSGATIVFKNAVQLVLDEEHYEILKKVAKVLEKNSENQTIAKKEGYTEELLSLYDELLEKLKDYKNRLANQAKTLEKGKEKFEKLNLEDKAEVINEIINLFHCNATTANNALKLIGGSKNRMKNNNISKSNKVSLINQSITGLYETKIDLGKLGED

SEQ ID NO: 126 - protein, 1368 aa, Artificial Sequence
  Sequence1368 residue - marginal ancestral sequence reconstruction method -  node 65
MKKEYYLGLDIGTNSVGWAVTDENYNLVKRHVKVLGNTDGKSKGKAMWGIRLFETAETAEERRMYRSSRRRLQRRKQRIDLLQEIFSEEIAKVDLTFFIRLNESRLHPEDKTEEKYPLFVDKETDKDYHKQYPTIYHLRKELIENPEPHDIRLVYLALHHIIKHRGHFLIEGDSDNKNTDLSEVFSELVKAFNDVIEYEILSTEALELEEILTDKTSKSAKAKEIAKLFEDEKEQQCIKALSKLIVGLTGNISEMFHQSEETSINFSESNYEENMEAIEEIIPDEFSELIDAIKALYDWAVLVEILGGSTYISEAKVKASMIARYEKHRKNLKQLKNLVKTYCSEEYKEFFSSDEKNGYSAYIKNGCSEEDFYKYLKKILEEKEKAEYLLAEIENETLLPLQRSKDNGTIPHQVHLQELKKILENASEYLPFLKENAEKIISIFKFRIPYYVGPLSRRNGSNAWMIRKEDGRIYPWNFDDVVDVEKSNEEFIERMTNKCTYLPGEDVLPKNSLLYSKFMVLNELNNLKIRGNKIKKRQRFSVELKQEIYNDLFCRNRKVTGKKILDYLKREYNEIDQADISGIDGDFKSALASYHDFKKLVGNGNSLDKEDYKEIIEEIIKWKTIYDDNKMLRRMIKKYPEVLSEEQIKKICKLKYTGWGNFSREFLTGVRGKETGESIINALWETDSSNDNLMQLLSNKDYSFKEEIDQINAEAAGENSYETVEDLYVSPANKRAIWQTLQIVEEIVKVMGKHEPKRIFVEMARGKEKNAKRTTSRKKRLKELYKSCKNDTRNLMKELGRDDNELRSKKLFLYYTQMGKCMYSGEEIDLDDLLNWDIDHIYPQSKIKDDSLDNMVLVRKEVNAKKSNELLSPEIREKMKPYWKMLLQKGFISKKKYDRLTRTTRGEFTDEELSGFIARQLVETRQSTKAVAELLKQLYPTEKDEEDKTIRDSEVVYVKANLVSEFRQDFDLLKCREVNDYHHAKDAYLNIVVGNVYHVRYTNNPAKWIKGNRDSNYLRKLIAKSAREENKANAKLHFYSSIKKMFSYDVKNADGTVIERPVIETNKKNGEIVWNKDSSIDQIRKIMNKNNILYTEYTYCEKGQLFNETLLKKGNSEKLIPLKKNLDPEKYGGYTTPKASYFALVEFDIEEGKKRKRKTHKQLIPVPVYEKAKLEHNAVKYLEERGLSNVVVDLKYKIKKNSLLKMDGYRMRLRGANIIFKNAVQLVLDEEHYEILRKVEKYLEKNSENQTIAKNEGFTEELLSLYEELLEKLKDYKNRPANQMKTLEKGKEAFESINLEDKAEVINEIIKLFRCNATTASNALKLINGSQNRMKNKNILNSNKVKLINQSITGLYETKIDLVKLGED

SEQ ID NO: 127 - protein, 1368 aa, Artificial Sequence
  1368 residue - marginal ancestral sequence reconstruction method - node 66
MKKDYYIGLDMGTNSVGWAVTDENYNLCKRHMKVLGNTDGKSKGKAMWGVRLFETAETAEERRMFRTARRRLQRRKQRIELLQEIFSEEISKVDIAFFLRLNESKLYPEDKTELPYALFVDKETDKDYHKQYPTIYHLRKELMQNDEPHDIRLVYLALHHIIKHRGHFLFEGDLDSEVTDFGAVFKELLKVINDELEIALLSEEALQIEEILKDKKSKSAKSKEIVKLLGSEKKQACIKALVKLIVGLTVKLSEIFGDGEKSSISFAESNYEENVETVEETLPERFSELIEAIKALYDWAVLVDILGGSTYISEAKVKTSMIARYEKHRKDLQQLKALVKTHCPEEYKEIFSSDKLNNYSAYIKNGCSQEDFYKYLKKTLEELEKAEYLLEEIENETFLPKQVSKDNGVIPYQVHLSELKKILKNAGEYLPFLKENAEKIEQIFEFRIPYYVGPLNRGNGENAWMVRKEDGKIYPWNFDNVVDVEKSAEEFIERMTNKCTYLPGEDVLPKNSLLYSKFMVLNELNNLRIDGEKIKKRQRFSVELKQAIYNDLFCRRRKVTGKKLKDYLKREGGTGKEAEISGIDGDFKSSLRAYHDFKKIVGKGNSLDEEDNQNIKEEIIKSITIFDDKKMLKKRLKKYPEILSEEQIKKICKLKYTGWGRLSREFLTEVRDKETGENIINALWETDSSNDNLMQLLSNKDYSFQEEIEQINAEAAGESSYETVEDLYVSPAVKRAIWQTLQIVEEIVKVMGKHEPKRVFVEMAREKGKNGKGRTSRKKRLKELYKSCKNDAPDLWKELGRDDNELRSDKLFLYYTQMGRCMYSGEPIDLEDLFKYDIDHIYPQSKVKDDSLDNRVLVKKEINSKKSDNYPSPEIREKMKPFWQMLLKKGFISKKKYDRLTRTTRGEFTDDELAGFIARQLVETRQSTKAVAELLKQLYPTEKDEEDKTIRDTEIVYVKANLVSEFRQDFDFIKCREVNDYHHAKDAYLNIVVGNVYHVKYTKNAAKFIKGNPGRNYLRKLIAKSAREENKANAKMHFYSNLKKMFTSDVPSADGTVIERPVIETNKRNGEIVWDKDGSIATVRKIMNKNNILYTRYSYEEKGGLFDQQILKKGNGQALIPLKKRLDIEKYGGYNKPTAAYFALVEYDIEEGKKGKKKTTKQLVAIPIYEKAKLEENPIKYLEERGLKNPAVDLLIKIKKNSLFEVDGFRMHLSGRTIVFKSAVQLVLDEENEAILKKVAKVLEKHKKNQKISKKEGYTEELLSLYDALLEKLKDYKIRLATQAKTLENGKEKFEKLSLEDKCQVINEILHLFQCNATTANNALSLIGGAKNIMTNNNISKCNKVSLINQSITGLYETKIDLKKIGED

SEQ ID NO: 128 - protein, 1368 aa, Artificial Sequence
  1368 residue - marginal ancestral sequence reconstruction method - node 67
MKKEYYVGLDMGTGSVGWAVTDENYNICRRHMKVLGNTDGKSKGKAMWGVRLFETANTAEERRMFRTARRRLQRRKQRIELLQEIFAEEISKVDIGFFLRMKESKYYPEDKPELPYALFVDDETDKDYHKQYPTIYHLRKMLMQNEEPHDIRLVYLALHHIIKHRGHFLFEGDISSEVTDFGAAFSEFLKVINDELEISLLDEEALQIEEILKDKKSKSAKKTELVKLLAAEKKQKCEKALLKLISGCTVKLSDIFGDGERSKISFADSNYEEYIATVEETLAERFLELIEAAKALYDWAVLVDILGGSTYISEAKVKTSMIARYEKHRRDLKQLKALVKTHLPEEYKDIFSSDKLNNYSAYIKNGCSKEDFYSFLKKNLKELEEAEYLLEEIENETFLPKQVSKDNGVIPYQVHLSELKKILKNAGEYLPFLKENAEKIEQIFKFRIPYYVGPLNKGNGENAWAVRKQDGKIYPWNFENVIDVEESAEKFIRRMTNKCTYLPGEDVLPKDSLLYSKFMVLNELNNLRIDGEKIKKRQRFSVELKQAVYEDVFCRYRKVTGKKLKDYLIREGITGKEAEISGIDGDFKSSLRAYHDFKQIVGKGKLLDVELTQNEKEDIIKNITIFDDKKMLKKRLKKYPEILSEKQIKKICALKYTGWGRLSREFLEEVQAKETGENIISALWETDSSNDNLMQLLSNKDYGFQEEIEQLNAEAAGKTSYETVEDLYVSPAVKRPIWQTLQIVEEIEKVMGKSKPKRVFVEMAREKGENGRGRTSRKKRLKELYKSCKKEAPDLWKELGHDDHKLRSDKLFLYYTQMGRCMYSGEPIDLEDLFKYDIDHIYPQSKVMDDSLDNRVLVKRELNAKKTDNYPSAEIREKMKPFWDMLLKKGFISKEKYDRLTRSTRGEFTENELAGFIARQLVETRQSTKAVAELLKQAYPTEKDEEDKTIKETEIVYVKANTVSEFRQDFDFIKVRDVNDYHHAKDAYLNIVVGNTYYVKFTKNAAWFIKGNPGRTYLRKLIAKSAREENKANAKLHFYSNLKKMFTSDVASADGTIIERPVIETNKRNGEIAWGKDGTIVTVRKVMNKNNILFTRRSYEVKGGLFDQQIMKKGKGQALIPVKERLSIEKYGGYNKATGAYFMLVESDIEEGKKGKKKTTKELVAIPLYEKAKLEDNAIRYLEERGLKNPKVDLLIKIKKDSLFEVDGFRMHLSGRTLIFKCANQLVLDEENEKILKKVAKVLERHKKNIKISDKDGYTEEMLIKYEAFLDKLKNYNIRLSTQAKTLENGKEKFEKLSLEDKCQVINEILHLFQCQSVAANNALSMIGGAANILVNNNISKCNKVSIINQSITGLYEQEIDLKKIGED

SEQ ID NO: 129 - protein, 1368 aa, Artificial Sequence
  1368 residue - marginal ancestral sequence reconstruction method - node 68
MKKEYYVGLDMGTGSVGWAVTDESYHICRRHMKVLGNTDGKAHGKALWGVRLFETANTAEERRMFRTSRRRLDRRKRRIELLQEIFAEEISKVDPGFFLRMKESKYYPEDKPELPYALFVDKETDKDYHKQYPTIYHLRKMLMQDEEPPDIRLVYLALHHMIKHRGHFLFAGDISDEVTDFGAAFSEFLKIIKDELDISLLDEEALQIEEILKDKLTRSAKKTELVKGLKAEKKNGCEKALLKLISGCTVKLSDIFGDGERPKISFADSSYEDYAAVVEDELGERFIEIIEAAKALYDWAVLVDILGGSTSISEAKVRTSMIARYEKHRRDLKYLKALVKTYLPEEYKDIFSSDKLNNYSAYIKNGCSKEDFYDFLKKNIKELEEAEYLLEELEKETFLPKQVSKDNGVIPYQVHLYELKKILKNAGEYLPFLKENAEKIEQIFEFRIPYYVGPLNKGNGEFAWAVRKSNEKIYPWNFENVIDVEASAEKFIRRMTNKCTYLPGEDVLPKDSLLYSKFMVLNELNNLRIDGEKIKKRQRFSVELKQEIYEDVFCRYRKVTAKKLKDYLIREGITGKDAEISGIDGDFKGSLRAYHDFKEILGKGKLLDVELTQNEKEDIILNITLFDDKKLLKKRLKKYPQILTEKQIKKICALNYTGWGRLSREFLEEVQAPETGENIITALWETDPSNDNLMQLLSNEDYGFQEEIEQLNAEKAGKTSYETVEDLYVSPAVKRQIWQTLQIVKEIEKVMGKEKPKRVFVEMAREKQENKRGRTSRKKRLKDLYKSCKNEEPDWWKELGHEEHKLRSDKLFLYYTQKGRCMYSGEPIDLEDLWKYDIDHIYPQSKVMDDSLNNRVLVKREYNAKKTDNYPSAEIRQKMKPFWKSLLTGGFISKEKYDRLIRSTRGEFTANELAGFIERQLVETRQSTKAVAEILKQVFPTEKDEEDKTIKETEIVYVKAKTVSEFRQDFDFIKVRDVNDFHHAKDAYLNIVVGNTYYVKFTKNAAWFIKENPGRTYLKKLIAKSAREEKKANAKLHFYSNLKKMFTSDVAVADGTIIEKPIIEINKRNGEIAWGKSGTIVTVRKMMNKNNILFTRRSYEVKGGLFDQQIMKKGKGQVYIPVKERLSIEKYGGYNKATGAYFMLVESDIEEGKKGKKKTTIEFVPIPLYEKAKLEANEARFLEERGLKEPKVDILIKIKKDTLFEVDGFKMHLSGRTLIFKCANQLILDEENEKILKKVAKVIQRQKKNVKISDKDGYTEELLMKYETFLDKLKNYGIRLSTQAKTLENGKEKFEKLSLEDKCQVLSEILHLFQCQSSAANNALSMIGGPGNILVNNNISKCNKISIINQSPTGIYEQEIDLKKIGED

SEQ ID NO: 130 - protein, 1368 aa, Artificial Sequence
  1368 residue - marginal ancestral sequence reconstruction method - node 69
MEKEYYVGLDMGTGSVGWAVTDESYHILRRHMKILGNTEGKAHGKAMWGVRLFESAKTAEERRMFRTSRRRLDRRNWRIEILQEIFAEEISKVDPGFFLRMKESKYYPEDKPELPYALFVDKDTDKDYHKKYPTIYHLRKMLMETEETPDIRLVYLALHHMMKHRGHFLLSGDISEEVTEFGTTFSQFLENIKNELDFNLLDEEALQIEEILKDKLTRSAKKTKLVKGLKAEKKNVCEKALLTLLSGGTVKLSDIFGMGERPKISFADNGYEDYAAVVENELGEQFYEIIEAAKAVYDWAVLVDILGGSTSVSEAKVRTSMIKRYEKHKSDLKYLKAIVKKYLPEEYKDIFSSDKLNNYSAYIKNGCSKEEFYDFLKKNIKELEAQEYLQEELEKETFLPKQVNKDNGVIPYQVHLYELKKILDNLGDKIPFLKENAEKIEQLFEFRIPYYVGPLNKGNGEFAWAVRKSNEKIYPWNFENVIDVEASAEKFIRRMTNKCTYLIGEDVLPKDSLLYSKFMVLNELNNLRLDGEKIKKRQKFSVELKQKIYRDVFCRYRKVTAKKLKNYLIREGITGKNVEITGIDGDFKGSLTAYHDFKEILGKGKLLDVELTQNEKEEIILNITLFDDKKLLKKRLKKYPQILTEKQIKKICALSYTGWGRLSKKFLEEVTAPETGENIITALWETDPSNDNLMQLLSNEDYRFMEEIEQFNAEKADKTSYETVEDLYVSPAVKRQIWQTLQIVKEIEKVMGKEKPKRVFVEMAREKQENKRGRESRKKKLSDLYKSCKNEEPDWVKELGHEEHKLRSDKLYLYYTQKGRCMYSGEPIDLEDLWKYDIDHIYPQSKTMDDSLNNRVLVKKEYNAKKSDTYPSADIRQKMKPFWKSLLTGGFISKEKYDRLIRNNRGELSANELAGFIERQIVETRQSTKAVAEILKQVFPTEKDEEDKTIKETEIVYVKAKTVSKFRQDFDFIKVRDVNDLHHAKDAYLNIVVGNTYYVKFTKNAAWFIKENPGRTYLKKLIAKSAREEKKANAKLHFYSNLKKMFTSDVAIEDGTIIEKPIIEINKRNGEIAWGKSGTIVTVRKMMNKNNILVTRRSYEVKGGLFDQQIMKKGKGQVYVPVKERLSIEKYGGYNKAAGAYFMLVESDIEEGKKGKEKRTIEFVPIPLYDKAKLESDEARFLEERGLKEPKVDILIKKIKDTLFEVDGFKMWLSGRTLIFKCANQLILDEENMKTLKKVVKFIQRQKKNVKISDKDGITEEVLMKYETFLDKLKNYGIRLSSQAKTLVNGKEKFEKLSLEDKCQVLYEILHLFQCQSSAANNALKMIGGPGNILVNNNISKCNKISIINQSPTGIYEKEIDLLKIGED

SEQ ID NO: 131 - protein, 1368 aa, Artificial Sequence
  1368 residue - marginal ancestral sequence reconstruction method - node 70
MKKDYSIGLDIGTNSVGWAVITDDYKVVRKKMKVLGNTDKKSIKKNLWGVRLFDSGETAEDTRLKRTTRRRYTRRRNRICYLQEIFQEEMNKVDDSFFHRLDESFLVPEDKKYDRHPIFGNLEEEVAYHEQYPTIYHLRKHLADSSEKADLRLVYLALAHIIKYRGHFLIEGDLNTENTDVEELFKQFVQVYNQTFEEQHLSDETIDVEEILTEKVSKSRRAENVLKLFPNEKKNGLFGQLIKLIVGLQGNFKKVFDLSEDAKLQFSKDTYEEDLENLLAMIGDEYADLFLAAKNLYDAILLSGILTTTDNNTKAKLSASMIKRYEEHQKDLAQLKQFIKEHLPDKYNEIFSDSSKNGYAGYIEGKTSQEDFYKYLKKILSKIDGAEYFLEKIEQENFLRKQRTFDNGVIPHQIHLEELRAILRRQGKYYPFLKENQEKIEQILTFRIPYYVGPLARGNSRFAWLTRKSDEPITPWNFDEVVDKEKSAEAFIERMTNYDTYLPNEKVLPKHSLLYEKFTVFNELTKVRYVTDRGKTQQNFSAEQKQEIFDDLFKKNRKVTKKKLENYLKKEYEYFDSPDITGIEDEFNASLGTYHDLLKILKSKDFLDDEENEEILEDIVKILTVFEDRKMIRKRLEKYSDILTEEQLKKLERRHYTGWGRLSRKLINGIRDKQSGKTILDYLIDDDSSNRNFMQLINDDNLSFKEEIEKAQVIGETENLHEIVQDLPGSPAIKKGILQSLKIVDELVKVMGRHEPKNIVVEMARENQTTSRGRRNSKQRLKRLEEALKNLGSNLLKEHPVDNQQLQNDRLYLYYLQNGKDMYTGQELDIDNLSNYDIDHIIPQSFIKDNSIDNRVLVSSEENRGKSDNVPSKEVVRKMKSFWQKLLKAGLISQRKFDNLTKAERGGLTEDDKAGFIKRQLVETRQITKHVANILDSRFNTEKDEEDNTIRNVKIITLKSNLVSQFRKDFGLYKVREINDYHHAHDAYLNAVVGTALLKKYPQLEPEFVYGDYRKNNLRKLIAKSAREENKATAKMHFYSNIMNFFASEVKIADGTVIERPVIETNKETGEIVWDKEKDIATVRKVLSYHQVNIVKKVEVQKGGFSKETILPKGNSNKLIPRKNNWDPKKYGGFDSPTVAYSVLVTYDIEKGKKKKLKTVKELVGITIMERSAFEKNPIAYLEKKGYQNPQEDVLIKLPKYSLFELENGRRRMLASAKELQKGNQMVLPAHLVTLLYHAKRIDKSNSNSESLEQKQEYVEEHRNEFDELLDYIIDFSEKYILADKNLEKIKKLYEQNNEADIKELAKSFINLLTFTAMGAPAAFKFFGETIDRKRYTSIKELLNATLIHQSITGLYETRIDLGKLGED

SEQ ID NO: 132 - protein, 1368 aa, Artificial Sequence
  1368 residue - marginal ancestral sequence reconstruction method - node 71
MKKDYTIGLDIGTNSVGWAVITDDYKVVRKKMKVLGNTEKKSIKKNFWGVRLFDSGETAEDTRLKRTTRRRYTRRRNRICYLQEIFQEEMNKVDDNFFHRLDESFLVPEDKKYDRHPIFGTLEEEVAYHEQYPTIYHLRKHLADSSEKADLRLVYLALAHIIKYRGHFLIEGELNTENTSVEELFKQFVQVYNQTFSEQELVDETIDVEEILTEKVSRSRRAENVLKLFPNEKSNGLFGQFIKLIVGNQGNFKKVFDLEEDAKLQFSKDTYEEDLENLLAMIGDEYADVFLAAKNLYDAILLSGILTTTDKNTKAKLSASMIERYEEHQKDLAQLKQFIKEHLPDKYNEIFSDSSKNGYAGYIDGKTSQEDFYKYLKKILEKIDGAEYFLEKIEQENFLRKQRTFDNGVIPHQIHLEELRAILRRQGKYYPFLKENQEKIEQILTFRIPYYVGPLAKGNSRFAWLTRKSDEPIRPWNFDEVVDKEKSATAFIERMTNYDTYLPNEKVLPKHSLLYEKFTVFNELTKVRYVDDRGKTQQNFSAEEKQEIFDDLFKKNRKVTKKKLENYLKNEYNYIDSPTIKGIEDEFNASFGTYHDLLKIGVSREFLDDEENEEILEDIVKILTVFEDRKMIRKQLEKYSDILSEETLKKLERRHYTGWGRLSRKLINGIRDKQSGKTILDYLIDDDSSNRNFMQLINDDNLSFKEEIEKAQAINETENLQEIVQDLPGSPAIKKGILQSLKIVDELVEIMGRYQPKNIVVEMARENQTTSRGKRNSKPRLKRLEEALKELGSNLLKEHPVDNQQLQNDRLYLYYLQNGKDMYTGQELDIDNLSNYDIDHIIPQSFITDNSIDNRVLVSSKENRGKSDNVPSKEVVRKMKSFWQKLLKAGLISQRKFDNLTKAERGGLTEDDKAGFIKRQLVETRQITKHVANILDSRFNTEKDEEDNTIRNVKIITLKSALVSQFRKTFGLYKVREINDYHHAHDAYLNAVVATTLLKVYPQLEPEFVYGEYRKNNLRKLIAKSAHEENKATAKKQFYSNIMKFFASEEPIIDGTVIERPVIETNKENGEILWDKEKDIATVKKVLSYHQVNIVKKVEIQKGGFSKETIQPKGNSNKLIPRKNNWDPKKYGGFDSPTVAYSVLITYDIEKGKKKKLKRVKEIVGITIMERSAFEKNPIAYLEKKGYQNPKEDVLMKLPKYSLFELENGRRRMLASAKELQKGNQMVLPSHLVTLLYHAKRIIESNSNSESLEQKQEYVEEHRQEFDELLDYIIDFSEKYILADKNLEKIKKLYEQNNEADIKELAKSFINLLTFTAMGAPADFKFFGETIPRKRYTSIKELLNATLIHQSITGLYETRIRLGELGED

SEQ ID NO: 133 - protein, 1368 aa, Artificial Sequence
  1368 residue - marginal ancestral sequence reconstruction method - node 72
MKKDYTIGLDIGTNSVGWAVITDDYDLVRKKMKVLGNTEKKSIKKNFWGVRLFDEGETAEDTRLKRTTRRRYTRRRNRISYLQEIFQEEMNKVDENFFHRLDESFLVPEDKKYDRHPIFGTLEEEVAYHEQYPTIYHLRKHLADSSEKADLRLVYLALAHIIKYRGHFLIEGELNTENTSVEETFKQFLQVYNQTFSEQELVDETIDVEEILTEKVSRSKKAENVLKLFPNEKSNGLFGQFLKLIVGNQGNFKKVFDLEEDAKLQFSKETYEEDLETLLAMIGDEYADVFLAAKNVYDAIELSGILSTTDKNTKAKLSASMIERYEEHKKDLAQLKQFIKEHLPDKYYEIFKDSSKNGYAGYIDGKTSQEDFYKYIKKILEKIDGAEYFLEKIEQENFLRKQRTFDNGVIPHQIHLEELRAILDRQGKYYPFLKENQEKIEQILTFRIPYYVGPLAKGNSRFAWLTRKSDEPIRPWNFDEVVDLEKSATRFIERMTNYDTYLPNEKVLPKHSLLYQKFTVFNELTKVRYIDDRGKTQQNFSSEEKQEIFDDLFKQNRKVTKKDLENYLKNEYQYIDSPTIKGIEDSFNASFSTYHDLLKIGVSREFLDDEENEEILEDIVKILTVFEDRKMIRKQLEKYSDVLSEETLKKLERRHYTGWGRLSKKLINGIRDKQSNKTILDYLIDDDGSNRNFMQLINDDNLSFKEEIEKAQSINETENLQEIVNDLPGSPAIKKGILQSLKIVDELVEIMGRYQPKNIVVEMARENQTTSRGKRNSKPRLKRLEEALKELGSNLLKEHPTDNQQLQNDRLYLYYLQNGKDMYTGQELDIDNLSNYDIDHIIPQSFITDNSIDNRVLVSSKENRGKSDNVPSKEVVRKMKPFWQKLLKAGLISQRKFDNLTKAERGGLTEDDKAGFINRQLVETRQITKHVANILDQRFNTEKDEEGNTIRNVKIITLKSALTSQFRKQFGLYKVREINDYHHAHDAYLNAVVATTLLKVYPQLEPEFVYGEYRKSNLRKLIAKSAFKENKATAKKQFYSNIMKFFASEEPIIDGTVIERPVIETNKENGEILWDKEKDIATVKKVLSYHQMNIVKKVEIQKGGFSKETIQPKGNSNKLIPRKNNWDPKKYGGFDSPTVAYSVVITYDIEKGKKKKLKRVKEIVGITIMERSAFEKNPIAYLEKKGYQNPKEDVLMKLPKYSLFELENGRRRMLASAKELQKGNQMVLPSHLVTLLYHAKRYIESNSNSESLEQKQEYVNEHRQEFDELLDYVIDFSEKYILADKNLEKIKKLYEQNKEADIKELAKSFINLMTFTAMGAPADFKFFGETIPRKRYTSIKELLNATLIHQSITGLYETRIRLGELGED

SEQ ID NO: 134 - protein, 1368 aa, Artificial Sequence
  1368 residue - marginal ancestral sequence reconstruction method - node 73
MKKDYTIGLDIGTNSVGWAVITDDYDLVRKKMKVLGNTDKKSIKKNFWGVRLFDEGETAEDTRLKRTTRRRYTRRRNRISYLQEIFQEPMSEVDENFFHRLDESFLVPEDKKYDRHPIFGTLEEEVAYHETYPTIYHLRKHLADSSEKADLRLVYLALAHIIKYRGHFLIEGELNTENTSISETFEQFLDVYNQTFSEQELVDETIKVEEILTEKVSRSKKAENVLKLFPNEKSNGLFGQFLKLIVGNQGNFKKVFDLEEDIKLQFSKETYEEDLETLLGMIGDEYADVFLAAKNVYDAIELSGILSTTDKNTKAKLSASMIERYEEHKKDLAQLKQFIKAHLPDKYYEIFKDSSKNGYAGYIDGKTSQEDFYKYIKKILSKTDGAEYFLEKIEQENFLRKQRTFDNGVIPHQIHLEELRAILDRQSKYYPFLKENQEKIEQILTFRIPYYVGPLAKGNSRFAWLVRKSDEPIRPWNFDEVVDLEKSATKFIERMTNYDTYLPNEKVLPKHSLLYQKFTVFNELTKVRYIDDRGKTQQNFSSEEKIEIFDDLFKQKRKVTKKDLVNYLENEYQYIDSPTIKGIEDSFNASFSTYHDLLKIGVSKEFLDDPENEEILEDIIKILTVFEDRKMIRKQLEKYSDILSEETLKKLERRHYTGWGRLSKKLINGIRDKQSNKTILDYLIDDDGSNRNFMQLINDDTLSFKEEIEKAQSINETENLQEIVNDLPGSPAIKKGILQSLKIVDEIVEIMGRYQPKNIVVEMARENQTTNRGKRNSKPRLKRLEEALKELDSNLLKEKPLDNEQLKNDRLYLYYLQNGKDMYTGQELDINNLSNYDIDHIIPQSFITDNSIDNRVLVSSKENRGKSDNVPSKEVVRKMKPFWQKLLKAGLISQRKFDNLTKAERGGLTEADKAGFINRQLVETRQITKHVANLLDQRFNTEKDEEGNTIRNVNIITLKSALTSQFRKKFGLYKVREINDYHHAHDAYLNAVVATTLLKVYPNLKPEFVYGEYRKSNLRKLIAKSMFKENKATAKKHFYSNIMKFFSSEEPIIDGTVIERPVIETNKENGEILWDKEKDISTVKKVLSYRQMNIVKKVEKQKGRFYKETIHPKGNSNKLIPIKNNLDPKKYGGFDEPTVAYSVVITYDIEKGKKKKLKRVKEIVGIPIMERSAFEKNPTAYLEKTGYNNPKEDVLMELPKYSLFELENGRRRMLASAKELQKGNQMVLPSHLVELLYHAKRYIESNSNSESLEQKQEYVNEHRQEFDELLDYVIDFSNKYISADKNLEKIKKLYEENKEADIKELAKSFINLMTFTAMGAPADFKFFGETISRKRYTSIKELLDSTLIYQSITGLYETRIRLEELGED

SEQ ID NO: 135 - protein, 1368 aa, Artificial Sequence
  1368 residue - marginal ancestral sequence reconstruction method - node 74
MKKNYTIGLDIGTNSVGWAVIKDDYTLVRKKMKVLGNTDKKKIKKNFWGVRLFDEGETAEDTRLKRTTRRRYQRRRNRISYLQEIFQEPMSEVDENFFHRLDESFLVPEDKKYDRHPIFGTLEEEVAYHDTYPTIYHLRKHLADSSEKADLRLVYLALAHIIKYRGHFLIEGELNTENTSISETFEQFLDTYNEIFSEQELVDEITKVEEILTEKVSRSKKAEQVLALFPNEKRNGLFGQFLKLIVGNQGNFKKVFDLEDDIKLQLSEETYEEDLETLLGMIDDEYADVFLAAKNVYDAIELSGILSTDDKNTKAKLSAQMIELYDEHKKDLAQLKQFIKAHLPDKYYEIFKDSSKNGYAGYIDGKTSQEDFYKYIKKVLKKTDNAEYFLEKIEQENFLRKQRSFYNGVIPHQIHLQELRAILDRQSKYYPFLKENRDKIESLLTFRIPYYVGPLAKGNSRFAWLERKSDEPIRPWNFDEIVDLEKSAEKFIERMTNYDTYLPDEKVLPKRSLLYQKFTVFNELTKVRYIDERGKTQQNFSSQEKIEIFDDLFKQKRKVTKKDLVNYLENEYQYIDSPDIKGIEDSFNASFSTYHDLAKIGVSKEYLDDPENEEILEDIIKILTIFEDRKMRKKQLQKYSDTLSEETLKKLERKHYTGWGRLSKKLINGIRDEQSNKTILDYLIDDDGSNRNFMQLINDDTLSFKEKIEKAQTINETNNIQEIVNDLPGSPAIKKGILQSLKIVDEIIEIMGRYQPKNIVVEMARENQTTKKGKNNSKARLKKLEEALKELDSNHVKEQPLDNEQLKNDRLYLYYLQNGKDMYTGQELDINNLSNYDIDHIIPQSFITDNSIDNRVLVSSTENRGKSDNVPSKDIVRKMKPFWKQLLKAGLISQRKFDNLTKAERGGLTEADRAHFINRQLVETRQITKHVANLLDQRFNTEKDEEGNTIRNINIVLLKSALTSQFRKKFGLYKVREINDYHHAHDAYLNAVVATTLLKVYPNLKPEFVYGEYRKNSLRKLIAKSMFKEDKATAKKHFYSNIMKFFSKEKLVNDGTVIERPVIETNKENGEILWDKEKDLSTIKKVLSYKQMNIVKKVEKQKGRLFKETIHPKGNSNKLIPIKNNLDPKKYGGFSEPTVAYSVVITYDIEKGKKKKLKRVKEIVGIPIMDRKAFEKHPTAYLEKTGYNNPTEDVLHELSKYSLFELENGSRRMIASAKELQKGNQMVLPSHLVELLYHAKRYDESNSNSESLEQKQEYVNEHRAKFDELLDYVIDFSNKYINADKNIEKIKKLYKENKEADVKELVESFINLMTFTAMGAPADFKFFGETISRKRYTSIKELLGSTLIFQSITGLYETRIRLEDLGED

SEQ ID NO: 136 - protein, 1368 aa, Artificial Sequence
  1368 residue - marginal ancestral sequence reconstruction method - node 75
MKKDYTIGLDIGTNSVGWAVITDDYDLVRKKMKVHGNTEKKSIKKNFWGVRLFDEGETAEDRRLKRTTRRRYTRRRNRISYLQEIFQEEMNKVDENFFHRLDESFLVPEDKKHDRHPIFGTLEEEVAYHEQYPTIYHLRKHLADSSEKADLRLVYLALAHIIKYRGHFLIEGELNTENTSVEETFKQFLQVYNQTFSEQEPVDETIDVEEILTEKVSRSKKAENVLKLFPNEKSNGMFAQFLKLIVGNQGNFKKVFDLEEDAKLQFSKETYEEDLETLLAKIGDEYADVFLAAKNVYDAIELSGILSTTDKNTKAKLSASMIERYEEHKKDLAQLKQFIKEHLPEKYYEIFKDSSKNGYAGYIEGKTSQEDFYKYIKKILEKIDGAEYFLEKIEQENFLRKQRTFDNGVIPHQIHLEELRAIIDRQGKYYPFLKENQEKIEQLLTFRIPYYVGPLAKGNSRFAWLTRKSDEPIRPWNFEEVVDLEKSATRFIERMTNYDTYLPNEKVLPKHSLLYQKFTVFNELTKVRYIDDRGKTQQNFSSEEKQEIFDDLFKQNRKVTKKDLENYLKNEYQYIESPTIKGIEDSFNASFSTYHDFLKIGVSREVLDDEENEEMLEDIVKILTVFEDRKMIRKQLEKYSDVLDEEILKKLERRHYTGWGRLSKKLINGIRDKQSNKTILDYLIDDDGLNRNFMQLINDDNLSFKEEIEKAQSITETENLQEIVQDLPGSPAIKKGILQSLKIVDELVEIMGRYQPKNIVVEMARENQTTSRGKRNSKPRLKRLEEALKELGSNLLKEHPTDNQALQNDRLYLYYLQNGKDMYTGQELDIHNLSNYDIDHIIPQSFITDNSIDNRVLVSSKENRGKSDNVPSKEVVKKMKPFWEKLYKAGLISQRKFDNLTKAERGGLTEDDKAGFINRQLVETRQITKHVANILHQRFNTEKDEEGNTIRNVKIITLKSALTSQFRKQFGLYKVREINDYHHAHDAYLNAVVATTLLKVYPQLEPEFVYGEYRKSNLRKLIAKSAFKENKATAKKQFYSNIMKFFASEEPIIDGTVIERPVIETNKENGEILWDKSKDIATIKKVLSYHQMNIVKKVEIQKGGFSKETIQPKGNSNKLIPRKNNWDPKKYGGFDSPNVAYSVVITYDIEKGKKKKLKRVKEIVGITIMERSAFEKNPIAYLEKKGYQNPKEDVLMKLPKYSLFELENGRRRMLASAKEAQKGNQMVLPSHLVTLLYHAKRYIESNFNSESLEQKQEYVNEHRQEFDELLDHVIDFSEKYTLADKNLEKIKKLYEQNKEADIKELAQSFINLMTFNAMGAPADFKFFGKTIPRKRYTSIKELLNATIIHQSITGLYETRRRLGDLGED

SEQ ID NO: 137 - protein, 1368 aa, Artificial Sequence
  1368 residue - marginal ancestral sequence reconstruction method - node 76
MKKDYTIGLDIGTNSVGWAVITDDYDLVRKRMKIHGNTEKKSIKKNFWGVRLFDEGETAEDRRLKRTTRRRYTRRRNRISYLQEIFQDEMNKVDENFFHRLNESFLVPEDKKHDRHPIFGTLEEEVAYHEQYPTIYHLRKHLADSNEKADLRLVYLALAHIIKYRGHFLIEGELNTENTSVEETFKQFLQEYNQTFSEQEPVDEDIDVEEILTEKVSRSRKAENVLKLFPNEKSNGMFAQFLKLIVGNQGNFKKVFDLEEDAKLQFSKETYEEDLETLLAKIGDEYADVFLAAKNVYDAIELSGILSTTDKNTKAKLSSSMIERYEEHKKDLAQLKQFIKEHLPEKYYEIFKDSSKNGYAGYIEGKTSQEDFYKYIKKILEKIDGAEYFLKKIEQENFLRKQRTYDNGVIPHQIHLEELRAIIDRQGKYYPFLLENQEKIESLLTFRIPYYVGPLAKGNSRFAWLIRKSDEPIRPWNFEEVVDLENSATRFIERMTNYDTYLPNEKVLPKHSLLYQKFTVFNELTKVRYIDDRGKECQNFSSEEKQEIFDNLFKKNRKVTKKDLENYLKNEYQYIESPTIKGIEDNFNASFSTYHDFIKIGVSREVLDDEDNEEMLEDIVKILTVFEDRKMIRKQLEKYSDVLDEEILKKLERRHYTGWGRLSKKLINGIRDKQSNKTILDYLIDDDGLNRNFMQLINDDNLSFKEEIEKAQLTTETENLKDIVNNLPGSPAIKKGILQSLKIVDELVEIMGRYQPKNIVVEMARENQTTSRGKRNSKQRLKRLEEALKELGSDLLKEHPTDNQALQNDRLYLYYLQNGKDMYTGQELDIHNLSNYDIDHIIPQSFITDNSIDNRVLVSSKENRGKSDNVPSKEVVKKMKPFWQKLYKAGLISQRKFDNLTKAERGGLTEDDKAGFINRQLVETRQITKHVANILHQRFNTEKDEEGNTIRNVKIITLKSALTSQFRKQFGLYKVREINDYHHAHDAYLNAVVATTLLKVYPQLEPDFVYGEYRKSNLRKLIAKSAFKENKATAKKQFYSNIMEFFSSEEPIIDGTVIERPVIETNKENGEILWDKSKDIATIKKVLSYHQMNIVKKVEIQTGGFSKETIQPKGNSNKLIPRKNNWDPKKYGGFDSPNVAYSIVITYDIEKGKKKKLKRVKEIVGITIMERSAFEKNPIAYLEKKGYQNPKEDVLMKLPKYSLFELENGRRRLLASAKEAQKGNQMVLPSHLVTLLYHAKRYIESNFNAESLEQKQEYVNEHRQQFDELLDHVIDFSEKYTLADKNLEKIKKLYEENKEADIKELAQSFINLMQFNKMGAPADFKFFGKTIPRKRYTSIKELLNATIIHQSITGLYETRRKLGKLGED

SEQ ID NO: 138 - protein, 1368 aa, Artificial Sequence
  1368 residue - marginal ancestral sequence reconstruction method - node 77
MKKDYTIGLDIGTNSVGWAVITDDYDLVRKRMKINGNTEKKSIKKNFWGVRLFDEGETAEDRRLKRTTRRRLTRRRNRISYLQEIFKDEMNKVDENFFHRLNESFYVPEDKKHDRHPIFGTLEEEVAYHKQYPTIYHLRKHLADSNEKADLRLVYLALAHIIKYRGHFLIEGELNTENSSVEETFKEFLQEYNQTFSLQPPVDEDIDVEAILTEKVSRSRKAENVLNLFPTEKSNGMFHQFLKLIVGNQGNFKKVFDLEEDAKLQFSKETYEEDLEALLAKIGDEYADVFLAAKNVYDAIELSGILSTTDNNTKAKLSSSMIERYEEHKKDLAALKQFIKEHLPEKYYEIFRDSSKNGYAGYIEGKTSEEDFYKYIKKILEKIDGAEYFIKKIDQENFLRKQRTYDNGVIPHQIHLEELRAIIERQGKYYPFLLENQEKIESLLTFRIPYYVGPLAKGNSKFAWIERKSDEPIRPWNFEEVVDLESSATRFIERMTNYDTYLPNEKVLPKHSLLYQKFTVFNELTKVRYIDDRGKECQNFSSKEKQEIFDNLFKKNRKVSKKDLENYLKNEYQYIESPTIKGIENNFNASFSTYHDFIKIGVSREVLDNEDYEEMLEDIVKILTVFEDRKMIRKQLEKYSDVLDEEILKKLERRHYTGWGRLSKKLINGIRDKQTQKTILDYLIDDDALNRNFMQLINDDNLSFKKEIEKAQLKTESENLKDIVDNLPGSPAIKKGILQSLKIVDELVEIMGRYEPKNIVVEMARENQTTSQGKRNSKQRLKRIEEALKELGSDLLKEHPTDNQALQNDRLYLYYLQNGKDMYTGQELDIHNLSNYDIDHIIPQSFITDNSIDNRVLVSSKENRGKSDNVPSEEVVKKMKPFWSKLYKAGLISQRKFDNLTKAERGGLTEDDKAGFINRQLVETRQITKHVASILHQRFNTENDEEGNTIRNVKIITLKSALTSQFRKQFGLYKVREINDYHHAHDAYLNAVVATTLLKVYPQLEPDFVYGEYRKSNLRKLIAKSAFKENKATAKKQFYSNLMEFFSSEEPIIDGTVIERPVIETNKENGEILWDKSKDIATIKKVLSYHQMNIVKKVEIQTGGFSKETIQPKGESNKLIPRKNNWDPKKYGGFDSPNVAYSIVITHDIEKGKKKKLKRVKEIVGITIMERSIFEKNQIAYLENKGYVNPKEDVLMKLPKYSLFELENGRRRLLASANEAQKGNQMVLPSHLVTLLYHAKRYIESNFNAESEEQKQEYVNEHRHQFDELLDHVIDFSEKYTLADTNLEKIKKLYEENKEAEIKELAQSFINLMTFNKMGAPADFKFFGKNIPRKRYTSIKELLNATIIHQSITGLYETRRKLGKLGED

SEQ ID NO: 139 - protein, 1368 aa, Artificial Sequence
  1368 residue - marginal ancestral sequence reconstruction method - node 78
MKKQYTIGLDIGTNSVGWAVISDDYDLIRKRMKINGDHEKGSMKKNFWGVRLFDEGETAEDRRIRRTTRRRLRRRRNRVHYLQSIFKDEMNKVDENFFHRLNESFYVPMDKEHDRHPIFGTLEEEVAYHKQFPTIYHLRKYLADSNEQADLRLVYLALAHIIKYRGHFLIEGELNTENSSVEETFKDFLHHYNQTFSLQPPISEDISVEADLTEKVSRSRKAENVLNKFGTEKSNGMFHQFLKLIVGNQGNFKKVFSLDEDRKLNITKETYEEDLEALLAEIGEDYRELFLAAKNVHDAIELSGILSVADDKTKASLSSSMIERYEEHKQDLSALKNFIKAHLPDRYYDIFRNSSKNGYAGYIEGKTSEEDFYKYLKKVLDKVDGAESFIKKIDEERFLRKQRTYDNGVIPHQIHLEELRAIIEKQGQYYPFLLENQEKIESLLTFRIPYYVGPLAKGQSKFAWIERKGDESIRPWNIEEEVDLVSSAEKFIEKMTNYDTYLPNEKVLPKHSLLIQKFNVFNELTKVQYVDDQGKRCQNFSSKEKQEIYDNLFKKNRTVSKKDLEDYLKNEYQYLENPTIKGIENKFNASLKTYHDFIKLGVSRDVLDNENYEERLEDIVKILTVFEDRKMIRKQLEKFSDVLDQDILKKLERRHYTGWGRLSQKLIDGIRDEHTQKTILDYLIDDDAPNRNFMQLINDDDLSFKKTIEEARLKTESDNLKDIVDKIPGSPAIKKGILQSLKIVDEIVEIMGGYEPESIVVEMARENQTTSQGQRNAKERLKRIEEALKELKSDLLKKHPVDQEALQNDRLYLYYLQNGKDMYTNQELDINNLSNYDIDHIIPRSFTTDNSIDNRVLVSSKDNRGKSDDVPSEEVVKNMKPFWSSLYRSNLISKRKFDNLTKAERGGLTEDDKAGFIKRQLVETRQITKHVASILHQRYNTENDEEAHTIRNVKIITLKSALTSQFRKAFDLYKVREINDYHHAHDAYLNAVVANLLLKVYPQLEPDFVYGEYRKTNLRKLIAKSAFKENKATAKKQFYSNLIERFSHEDQIIDGTVIERPVIETNKENGEIVWDKSKDIAKIKRVLSYHQMNIVKKVEIQTGNFSKETVQPKGESNKLIPRKKDWDPKKYGGFDSPNVAYSIIFTHDIEKGKKKKLKEVKEIIGITIMDQSIFEADQIKYLENKGYVNPKEDIKFKLPKYSLFELENGRRRLLASANEAQKGNQMVLPSHLVTLLYHCKRYIDSSFNADHEEQKQTYINENRHQFNELLDHVLNFSAQYTLAEANEEKIKKLYEENNQAEVSELATSFINLMDFNKMGAPSAFKFFGTNIERKRYTSIKELLNATIIYQSITGLYETRKEVGKLGED

SEQ ID NO: 140 - protein, 1368 aa, Artificial Sequence
  1368 residue - marginal ancestral sequence reconstruction method - node 79
MKKEYTIGLDIGTNSVGWAVLTDDYDLVRKKMKVHGNTEKKSIKKNFWGVRLFDEGETAEDRRLKRTTRRRYTRRRNRISYLQEIFQEEMNKVDENFFHRLDESFLVPEDKKHDRHPIFGTLEEEVAYHEQYPTIYHLRKHLADSSEKADLRLVYLALAHIIKYRGHFLIEGELNTENTSVEETFKQFLQVYNQTFSEQEPVDETIDVEEILTEKVSRTKKAENVLKLFPNEKSNGMFAQFLKLIVGNQGNFKKVFDLEEDAKLQFSKETYEEDLEALLAKIGDEYADVFLAAKNVYDAVELSGILSTTDKNTKAKLSASMIERYEEHKKDLAQLKQFIKENLPEKYHEIFKDSSKNGYAGYIEGKTSQEDFYKYIKKILEKIDGAEYFLEKIEQENFLRKQRTFDNGVIPHQIHLEELRAIIDRQAKYYPFLKENQEKIEQLLTFRIPYYVGPLAKGNSRFAWLTRKSDEPIRPWNFEEVVDLEKSATRFIERMTNYDTYLPNEKVLPKHSLLYQKYMVFNELTKVSYIDDRGKTQQNFSSEEKQEIFDDLFKQNRKVTKKDLENFLRNEYNYIESATIKGIEDSFNASFSTYHDFLKIGVTQEVLDDPENEEMLEDIVKILTVFEDRKMIRKQLSKYSDVLDEEVLKKLERRHYTGWGRLSKKLINGIRDKQSNKTILDYLINDDGLNRNFMQLINDDNLSFKEEIEKAQSITDTENLQEIVQDLPGSPAIKKGILQSLKIVDELVEIMGRYQPKNIVVEMARENQTTSRGRRNSKPRLKALEEALKELGSNLLKEHPTDNQALQNDRLYLYYLQNGKDMYTGQELDIHNLSNYDIDHIIPQSFITDNSIDNRVLVSSKENRGKSDDVPSKEVVKKMKPFWEKLYRAGLISQRKFDNLTKAERGGLTEDDKAGFIQRQLVETRQITKHVANILHQRFNSEKDEEGNTIRKVRIITLKSALTSQFRKQFGLYKVREINDYHHAHDAYLNGVVATTLLKVYPQLEPEFVYGEYHKFNLRKLIAKSAFKENKATAKKQFYSNIMKFFASDEPIIDGTVIERPVIETNKENGEILWDKSKNIATVKKVLNYHQMNIVKKVEIQKGGFSKETIQPKGDSNKLIPRKNNWDPKKYGGFDSPNVAYSVVITYDIEKGKKRKLKRVKEIVGITIMERSAFEKNPIAFLENKGYQNPKEDVLMKLPKYTLFELENGRRRMLASAKEAQKGNQMVLPAHLVTLLYHAKHYDESNFNSESLEQKQEYVNEHRQEFSEILEHVIDFAEKYTLADKNLEKIQKLYEQNQEADIKELAQSFVNLMQFNAMGAPADFKFFGKTIPRKRYTSIKELLNATIIHQSITGLYETRRRLGDLGED

SEQ ID NO: 141 - protein, 1368 aa, Artificial Sequence
  1368 residue - marginal ancestral sequence reconstruction method - node 80
MKKEYTIGLDIGTNSVGWAVLTDDYRLVAKKMKVHGNTEKKSIKKNFWGVRLFDEGQTAEARRSKRTTRRRLARRRNRILELQEIFAEEILKIDEHFFARLDESFLVPEDKKHSRHPIFATLEEEKSYHQTYPTIYHLRQHLADSSEKADIRLVYLALAHILKYRGHFLIEGELNTENTSVEETFRQFLQTYNQQFSEPEPVDESVDVAVILTEKLSKTKKAEKVLKYFPNEKSNGYFAQFLKLMVGNQGNFKKVFDLEEEAKLQFSKETYEEDLEELLEKIGDEYADVFLQAKNVYDAILLSEILSTTTKNTKAKLSAGMIERYEEHKKDLAQLKQFVKENLPEKYHELFKDSSKNGYAGYIEGKTTQEDFYKFVKKELSGIDGSEPFLEKIEQENFLRKQRTFDNGVIPHQIHLTELRAIIDRQKKYYPFLKEAQEKIESLLTFRIPYYVGPLAKGQSPFAWLIRKSEEKIKPWNFEEVVDMEKSAMRFIERMTNYDTYLPNEKVLPKHSLLYQKFMIFNELTKVSYKDERGKTHQYFSSEEKREIFDELFKKNRKVTKKDLQNFLYLNYNYIENAEIKGIEKAFNASYSTYHDFLKLSEMEEWLEDPEMESMFEDIVKILTVFEDREMIRTQLSKYEAVLGEEILKKLAKKHYTGWGRLSKKLIQGIRDKQSNKTILDYLINDDGFNRNFMQLINDDNLSFKEEIEKAQAITDTENLQEIVKDLPGSPAIKKGILQSLKIVDELVEIMGGYEPKNIVVEMARENQTTSRGLKNSKPRLKALEEALKDFGSQLLKEHPTDNQALQKDRLYLYYLQNGKDMYTGEPLDIHRLSDYDIDHIIPRSFITDNSIDNKVLVSSKENRGKKDDVPSEKVVKKMRPFWEKLYRAKLISQRKFDNLTKIERGGLTEEDKAGFIQRQLVETRQITKHVANILHQRFNSKKEDEGKAIRKVRIITLKSALTSQFRKTFGIYKVREINDYHHAHDAYLNGVVAIALLKKYPQLAPEFVYGEYLKFNLRKLIAKSAHKENKATAKKEFYSNIMKFFESDEPICDGTVIERPVIETNKENGEIFWDKSKNIAQIKKVISYHQMNIVKKVEIQKGGFSKETVQPKGNSNKLIPRKNNWDPAKYGGFGSPNVAYTVAFTYDIEKGKARKLKRAKAIEGITIMERSAFEQNPIAFLKNKGYENAKEDVLMKLPKYTLFELENGRRRMVASHKEAQKANSFILPEHLVTLLYHAKHYDEISFHKESFEQKQDYVNEHRSEFSEILDHVIDFAGKYTLADKNIEKIQKLYEENQEDDIAELAQSFVNLMQFNAMGAPADFKFFDVTIPRKRYTSLTEIWDATIIHQSITGLYETRIRMGNLGEQ

SEQ ID NO: 142 - protein, 1368 aa, Artificial Sequence
  1368 residue - marginal ancestral sequence reconstruction method - node 81
MKKEYTIGLDIGTNSVGWAVLTDDYRLVAKKMSVHGNTEKKKVKKNFWGARLFDEGQTAEARRSKRTTRRRLARRRNRILELQEIFAEEILKIDEHFFARLDESFLVPEDKKYTRFPIFPTLEEEKSYHQTYPTIYHLRQHLADSTEKADIRLVYLALAHILKYRGHFLFEGELDTENTSVEETFRQFLQVYNQQFSEPEPVDESEGVAVILTEKLSKTKKVEKVLKYYPNEKSNGYFAQFLKLIVGNQGNFKKVFDLEEEAKLQFSKETYEEDLEELLEKIGDEYADVFLQAKNVYDAILLSEILSTTKKNTKAKLSAGMIERYEEHKKDLAKLKQFVKENLPEKYAEFFKDSSKNGYAGYIEGKTTQEDFYKFVKKELSGIDGSEPFLEKIDQENFLLKQRTFANGVIPHQIHLTELRAIIDRQKKYYPFLKEAQEKIEQLLTFRIPYYVGPLAQGQSPFAWLERKSAEKITPWNFEEVVDMEKSAMRFIERMTNQDTYLPTEKVLPKHSLLYQKFMIFNELTKVSYKDERGKTHQYFSSEEKREIFDELFKKHRKVTKKKLQNFLYLNYNYIENAEIKGIEKAFNASYSTYHDFLKLAEMEEWLEDPEMESMFEDIVKILTIFEDREMIRTQLSKYEAVLGEQVLKKLAKKHYTGWGRLSEKLIQGIRDKQSNKTILDYLIDDDDFNRNFMQLINDDHLSFKEEIAKALAISDSESLLEVVKALPGSPAIKKGIWQSLKIVEELVEIMGGYNPKNIVVEMARENQTTSRGLKNSKPRLKALEEALKNFGSPLLKEHPTDNQALQKDRLYLYYLQNGKDMYTGEPLDIHRLSEYDIDHIIPRSFIVDNSIDNKVLVSSKENRGKMDDVPSEKVVKKMRPFWEKLQRAKLISERKFANLTKIERGGLTEEDKARFIQRQLVETRQITKHVANILHQHFNQKKEDEGKASGKVRIITLKSTLTSQFRKTFGIYKVREINNHHHAHDAYLNGVVAIALLKKYPKLAPEFVYGNYIKFNLRKLIAKSLHKENKATAKKEFYSNIMKFFESEEPSCDGTVIERPVIETNKENGEIFWDKSRNIAQIKKVISSHQVNIVKKVEIQKGGFYKETVNPKGNPDKLIPRKNNWDPSKYGGFGSPVVAYTVAFIYDIEKGKARKLKRAKAIEGITIMEQSAFEQDPIAFLKNKGYENVKEDEFMKLPKYTLFELENGRRRMVASHKEAQKANSFILPEHLVTLLYHAQHYDEISFHKESFEQKQDYVNEHRSEFSEILDHVIDFAGRYTLADKNIEKIQKLYEQNQEDDIAELAQSFVNLMQFNAMGAPADFKFFDVTIPRKRYTSLTEIWDATIIYQSITGLYETRIRMGNLGEQ

SEQ ID NO: 143 - protein, 1368 aa, Artificial Sequence
  1368 residue - marginal ancestral sequence reconstruction method - node 82
MAKDYTIGLDIGTNSVGWAVLTDDYRLMAKKMSVHGNTEKKKVKKNFWGARLFDEGQTAEARRSKRTTRRRLARRRNRILELQEIFAEEILKIDEHFFVRLDESFLVPEDKQYTRFPIFPTLEEEKSYYQTYPTIYHLRQKLADSTEKADIRLVYLALAHILKYRGHFLFEGELDTENTSVEETFKQFLEIYNQQFDQPLAVDESEGVAVILTEKLSKTKKVEKILKYYPTEKTNGCFAQFLKLIVGNQGNFKKVFDLEEEAKLQFSKETYEEDLESLLEKIGDEYADVFLQAKKVYDAILLSEILSTTKKNTKAKLSAGMIERYESHKKDLAKLKQFVKENLPEKTAVFFKDSSKNGYAGYIEGKTTQEDFYKFVKKELSGIVGSEPFLEKIDQENFLLKQRTFANGVIPHQVHLTELKAIIDRQKQYYPFLEEARDKIISLLTFRIPYYVGPLAQGQSSFAWLERKTAEKITPWNFTEVVDIEKSAMRFIQRMTNQDTYLPTEKVLPKHSLLYQKYMIFNELTKVSYKDERGIKHQYFSSEEKREIFKELFQKQRKVTVKKLQNFLYANYNYIENAEILGIEKAFNASYSTYHDFLKLAKMQEWLEQPEMESMFEDIVKILTIFEDREMIRTQLSKYQAVLGEKLLKKLAKKHYTGWGRLSEKLIHGIRDKKTNKTILDYLIDDDDFNRNFMQLINDDHLSFKEEIAKALALSDNQSLLEVVQALPGSPAIKKGIWQSLKIVEELIEIIGGYNPKNIVVEMARENQKTNRGLKNSKPRLKALEEALKNFGSPLLKEQPTDNQALQKDRLYLYYLQNGKDMYTGEPLDIDRLSEYDIDHIIPRSFIVDNSIDNKVLVSSKENRGKMDDVPSEKVVKKMRRFWEKLQRAKLISERKFAYLTKIERGGLTPEDKARFIQRQLVETRQITKHVANILHQHFNQPQEDEGKGCGKVRIITLKSTLTSQFRKTFGIYKVREINNHHHAHDAYLNGVVAIALLKKYPKLAPEFVYGNYIKFNLRKLIAKSLAKENKATAKKEFYSNILKFFESEEPSCDGTVIERPVIETNKENGEIFWDKSRHIPQIKKVISSHQVNIVKKVEVQKGGFYKETVNPKGKPDKLIQRKNNWDVSKYGGFGSPVVAYAVAFIYDIEKGKARKLKKAKAIEGITIMEQSAFEQDPIAFLKNKGYSNVTEDKFIKLPKYTLFELENGRRRMVASHKEAQKANSFILPEQLVTLLYHAQHYDEISFHKESFEQKQDYVNDHLSEFSEILDQVIDFAGRYTLADKNIEKIQELYEQNQEGDTQNLAQSFINLMQFNAMGAPADFKFFDVTIPRKRYTSLTEIWDATIIYQSITGLYETRIRMGNLGEQ

SEQ ID NO: 144 - protein, 1368 aa, Artificial Sequence
  1368 residue - marginal ancestral sequence reconstruction method - node 83
MKKEYTIGLDIGTNSVGWAVLTDDYDLVKKKMKVYGNTEKKSIKKNFWGVRLFDEGETAEDRRLKRTTRRRYTRRRNRISYLQEIFQEEMNKVDENFFHRLDESFLVPEDKKHDRHPIFGTLEEEVAYHEQYPTIYHLRKHLADSSEKADLRLVYLALAHIIKYRGHFLIEGKLNTENTSVEETFKQFLQTYNQTFSEQEPVDETIDVEEILTEKVSRTKKAENVLKLFPNEKSNGMFAQFLKLIVGNQGNFKKVFDLEEDAKLQFSKETYEEDLEALLAKIGDEYADVFVAAKNVYDAVELSGILTVTDKNTKAKLSASMIERYEEHKKDLKQLKQFIRENLPEKYHEIFKDSSKNGYAGYIEGKTSQEDFYKYIKKILEKIDGAEYFLEKIEQENFLRKQRTFDNGVIPHQIHLEELRAIIHRQAKYYPFLKENQEKIEQLLTFRIPYYVGPLANGNSRFAWLTRKSDEPIRPWNFEEVVDLGKSATAFIERMTNYDTYLPNEKVLPKHSLLYQKYMVFNELTKVSYIDDRGKTQQNFSSEEKQQIFDDLFKQNRKVTKKDLENFLRNEYNYIESATIKGIEDSFNASFSTYHDFLKIGVTQEVLDDPENEEMLEDIVKILTVFEDRKMIREQLSKYSDVLDEEVLKKLERRHYTGWGRLSAKLINGIRDKQSNKTILDYLINDDGLNRNFMQLINDDNLSFKEEIEKAQSTTNTEDLQEIVQDLAGSPAIKKGILQSLKIVDELVEIMGRYPPKNIVVEMARENQTTSRGRRNSKPRLKALEEAMKELGSNLLKEHPTDNQALQNDRLYLYYLQNGKDMYTGQELDIHNLSNYDIDHIIPQSFITDNSIDNRVLVSSTENRGKSDDVPSKEVVKKMKAFWEKLYRAGLISQRKFDNLTKAERGGLTEDDKAGFIQRQLVETRQITKHVANILHQRFNSEKDEEGNTIRKVRIITLKSALTSQFRKQFGLYKVREINDYHHAHDAYLNGVVATTLLKVYPQLEPEFVYGEYHKFNLRKLIAKSAFKENKATAKKQFYSNIMKFFASDEPIIDGTVIERPVIETNKENGEILWDKSKNIATVKKVLNYHQMNIVKKVEIQKGGFSKETIQPKGDSNKLIPRKNNWDPKKYGGFDSPNVAYSVVITYDIEKGKKRKLKRVKEIVGITIMERSAFEKNPIAFLEEKGYQNPKEDVLMKLPKYTLYELENGRRRMLASAKEAQKGNQMVLPAHLVTLLYHAKHCDESNFNGESLEQKQEYVNEHRAEFSEILEHVIDFAEKYTLADKNLEKILKLYEQNQEADIKEIAQSFVNLMQFNAMGAPADFKFFGKTIPRKRYTSIKELLNATIIHQSITGLYETRRRLGDLGED

SEQ ID NO: 145 - protein, 1368 aa, Artificial Sequence
  1368 residue - marginal ancestral sequence reconstruction method - node 84
MKKEYTIGLDIGTNSVGWAVLTEDYDLVKKKMKVYGNTEKKYIKKNFWGVRLFDEGETAEDRRLKRTTRRRYTRRRNRISYLQEIFQEEMNKVDENFFHRLDESFLVPEDKKHERHPIFGTLEEEVAYHEQYPTIYHLRKHLADSSEKADLRLVYLALAHIIKYRGHFLIEGKLNTENTSVEETFKTFLQVYNQTFSEQEPVDETIDIEEIFTEKVSRAKKAENVLKLFPNEKSNGTFAQFLKLIVGNQGNFKKTFDLEEDAKLQFSKEEYEEDLEALLAKIGDEYADVFAAAKNVYDAVELSGILTVTDNNTKAKLSASMIERYEEHKKDLKQLKQFIRKNLPEKYHEIFKDSSKNGYAGYIENSTSQEDFYKYIKKILEKIDGAEYFLEKIEQENFLRKQRTFDNGVIPHQIHLEELRAIIHRQAKYYPFLKENQEKIEQLLTFRIPYYVGPLANGNSRFAWLSRKSDEPIRPWNLAEVVDLGKSATAFIERMTNYDTYLPNEKVLPKHSMLYEKYMVFNELTKVSYIDDRGKTQQNFSSEEKQQIFDDLFKQNRKVTKKDLENFLRNEYNYIESATIKGIENSFNASFSTYHDFLKIGITQEVLDDPENEEMFEEIVKILTVFEDRKMIREQLSKYSDVLDEEVLKKLERRHYTGWGRLSAKLINGIRDKQSNKTILDYLINDDGLNRNFMQLINDDNLSFKEEIEKAQSETNTEDLHEIVQDLAGSPAIKKGILQSLKIVDELVEIMGRYPPKNIVVEMARENQTTSRGRRNSKPRLKALEEAMKELGSNLLKEHPTDNQALQNDRLYLYYLQNGKDMYTGQELDIHNLSNYDIDHIIPQSFITDNSIDNRVLVSSTENRGKSDDVPSKEVVKKMKAFWEKLYRSGLISQRKFDNLTKAERGGLTEDDKAGFIQRQLVETRQITKHVARILHQRFNSEKDEEGNTIRKVRIITLKSALTSQFRKQFGLYKVREINDYHHAHDAYLNGVVATTLLKVYPQLEPEFVYGEYHKFNLRKLIAKSAFKENKATAKKQFYSNIMKFFASDEPIIDGTVIERPVIETNKENGEILWDKSKNIATVKKVMNYHQMNIVKKVEIQKGGFSKETIQPKGDSDKLISRKNNWDPKKYGGFDSPNVAYSVVITYDIEKGKKRKLKRVKEIVGITIMERSAFEKNPVAFLEEKGYQNPKEDVLMKLPKYTLYELENGRRRLLASAKEAQKGNQMVLPAHLVTLLYHAKHCDESNFNGESLEQKQEYVNEHRAEFSEILEHVKDFAEKYTLADKNLEKILKLYEQNQEADIKEIAQSFVNLMQFNAMGAPADFKFFGKTIPRKRYTSIKELLNATIIHQSITGLYETRRRLGDLGED

SEQ ID NO: 146 - protein, 1368 aa, Artificial Sequence
  1368 residue - marginal ancestral sequence reconstruction method - node 85
MKKEYTIGLDIGTNSVGWAVLTENYDLVKKKMKVYGNTEKKYIKKNFWGVRLFDEGETAEDRRLKRTTRRRYTRRRNRISYLQEIFQEEMNKVDENFFHRLDESFLVPEEKRHERHPIFGTLEEEVAYHEQFPTIYHLRKHLADSSEKADLRLVYLALAHIIKYRGHFLIEGKLNTENSSVEETFKTFLQVYNQTFSEQEPVDETIDIEEIFTEKVSRARKAENVLKLFPNEKSNGTFAQFLKLIVGNQGNFKKTFDLEEDAKLQFSKEEYEEELEALLAIIGDEYADVFAAAKNVYDAVELSGILTVTDNNTKAKLSASMIERYEEHKKDLKQLKQFIRKELPEKYHEIFRDSSKNGYAGYIENSVSQAEFYKYIKKILEKIPGAEYFLEKIEQENFLRKQRTFDNGVIPHQIHLEELRAIIHKQAKYYPFLKENQEKIEQLLTFRIPYYVGPLADGNSRFAWLSRKSDEPIRPWNLAEVVDLGKSATAFIERMTNYDTYLPNEKVLPKHSMLYEKYMVFNELTKVSYIDDRGKTQQNFSSEEKKQIFDELFKQNRKVTKKLLENFLRNEYNYIEDATIKGIENSFNASYGTYHDFLKIGITQEMLDDPENEEMFEEIVKILTVFEDRKMIREQLSKYSDVFDEEVLKKLERRHYTGWGRLSAKLINGIRDKQSNKTILDYLINDDGLNRNLMQLINDDNLSFKEEIAKAQSETNTEDLHEIVQDLAGSPAIKKGILQSLKIVDELVEIMGRYPPKNIVVEMARENQTTSRGRRNSKPRLKALEEAMKELGSNLLKEYPTDNQALQNDRLYLYYLQNGKDMYTGQELDIHNLSNYDIDHIIPQSFITDNSIDNRVLVSSTENRGKSDDVPSKEVVKKMIAFWEKLKRSGLISQRKFDNLTKALRGGLTEDDKAHFIQRQLVETRQITKHVARILHQRFNSEKDEEGNTIRTVRIITLKSALTSQFRKQFGLYKVREINDYHHAHDAYLNGVVATTLLKVYPQLEPEFVYGDYHKFNLRKLIAKSAFKENKATAKKQFYSNIMKFFASDEPIIDGTVIERPVIETNKENGEILWDKSKNIATVKKVMNYHQMNIVKKVEIQTGGFSKETIQPKGDSDKLISRKTNWDPKKYGGFDSPNVAYSVVITYDIEKGKKRKLKRVKEIVGITIMERSAFEKNPVAFLEEKGYQNPKEDVLMKLPKYTLYELENGRRRLLASANEAQKGNQMVLPAHLVTLLYHAKHCDESNFNGKSLEQKQEYVNEHRAEFSEILEYVKDFAEKYTLADKNLEKILKLYEQNQEADIKEIAQSFVNLMQFNAMGAPADFKFFGKTIPRKRYTSIKELLNATIIHQSITGLYETRRRLGDLGED

SEQ ID NO: 147 - protein, 1368 aa, Artificial Sequence
  1368 residue - marginal ancestral sequence reconstruction method - node 86
MNKEYTIGLDIGTNSVGWAVLDENYDLVKKKMKIQGNGDKKKVKKNFWGVRLFDAGETAEGTRMKRTTRRRYTRRRNRISYLQEIFQGEMDKVDENFFHRLDDSFLVPEEKRNERHPIFATLEEEVAYHEQFPTIYHLRKHLADSTEKADLRLVYLALAHIIKYRGNFLIEGKLNTENSSVKETFKTFLQAYNQAFTVQEPVNETIDIGSLFQERVSRQRKAENVLKLFPNEKSNGTFMQFLKLIVGNQGNFKKTFGLEEDAKLQFSKEEYEEELEGLLAIVGDEYADVFAAAKNVYDAVELSGILTVKDINTKAKLSASLIKRYEEHKTDLEQLKKFVRKELPEKYYEVFRDSTKNGYAGYIENSVSQADFYKYLKKILEKIPGAEYFLEKIEQEDFLRKQRTFDNGVIPHQIHLEELRAIIRKQSRYYPFLKENQEKIEQILTFRIPYYVGPLADGNSRFAWLSRKTDGSIRPWNFTEVVDEGKSATAFIERMTNYDSYLPQEKVLPKHSMLYEKYMVFNELTKVSYIDDRGETQQNFSSVEKKEIFDELFKKNRKVTYALLENFLKNQYMYIETAEIKGIEKSFNASYGTYHDLLKIGISQEMLDDPENEEMFEEIVKILTVFEDRKMIKEQLSKYADYFEAGVLKKLVRRHYTGWGRLSAKLINGIRDKQSKKTILDYLMRDDDLNRNLMQLINDDNLSFKESIAQQQSEDQTEDLHEIVKELAGSPAIKKGILQSLKIVDEIVEIMGGYPPTNIVVEMARENQTTSRGRKKSKPRQKVLEEAMKEFGSNLLKEYPPDNANLRNDRLFLYYLQNGKDMYTGKELDIHNLSNYDIDHIIPQSFIKDNSIDNMVLVSSTENRGKSDDVPSKEVVEKMIGFWEKLKRSGLISQRKFDNLTKALNGGLTEADKAHFIQRQLVETRQITKHVARILHQKYNSEDEDEGNTIRTTRIITLKSALTSQFRQIYQLYKVREINDYHHAHDAYLNGVVATTLLKVYPRLEPEFVYGDYQKFNLRKLIAKSLFKENKATAKKNFYSNLMRFFASDQPKVDGTVIERPVIETNKENGEILWDQSKNIAMVKKVMNYHQMNIVKKTEIQTGGFSKESIQPKGDSAKLIARKTEWDPKKYGGFDSPNIAYSVVITYDIEKGKKRKLKRVKEIVGITIMERRQFEKNEVEFLEEKGYQNPREDVLVKLPKYTLYELENGRRRLIASASEAQKGNQMVLPNHLVELLYHAKHCDDLNFDGKSLEQKQAYLNAHRAEFNELFEYVKHFAERYTLADKNLKKLSKLYEQNQEADIKVMAQSFLNLMQFNAMGAPADFKFFDTTIPRKRYTSIKEILTATIIHQSITGLYETHWKLGELGED

SEQ ID NO: 148 - protein, 1368 aa, Artificial Sequence
  1368 residue - marginal ancestral sequence reconstruction method - node 87
MKKDYTIGLDIGTNSVGWAVLTDDYDLVKKKMKVYGNTEKKQIKKNFWGVRLFDEGETAEDRRLKRTTRRRITRRRNRISYLQEIFQEEMNKVDENFFHRLDESFLVPEDKKHDRHPIFATLEEEVAYHENYPTIYHLRKKLADSSEKADLRLVYLALAHIIKYRGHFLIEGKLNTENTSVEETFKQFLQTYNQTFANGEPLDESIDVEEILTEKVSRTKKAEKVLKLFPNEKSNGMFAQFLKLIVGNKGNFKKVFDLEEDAKIQFAKESYEEDLEALLAKIGDEYADVFVAAKNVYDAVELSSILTVTDKNTKAKLSASMIERFEEHKKDLKQLKQFIRENLPEKYNEIFKDSQKDGYAGYIEGKTSQEDFYKYIKKILENIDGAEYFLEKIEQENFLRKQRTFDNGVIPHQIHLEELQAIIHRQAKYYPFLKENQEKIEQLVTFRIPYYVGPLANGNSRFAWLTRKSDEPIRPWNLEEVVDLGKSATAFIERMTNYDTYLPNEKVLPKHSLLYQKYMVFNELTKVSYIDDRGKTQQNFSGEEKQQIFDDLFKQKRKVKKKDLEQFLRNEYNYIESATIKGIEDSFNASFSTYHDLLKIGVTQEVLDDPENAEMLEDIVKILTVFEDRKMIREQLSKFSDVLDEEVLKKLERRHYTGWGRLSAKLINGIRDKQSNKTILDYLINDDGLNRNFMQLINDSNLSFKNEIEKAQSSTNDEDLQEIVNDLAGSPAIKKGILQSLKIVDELVEIMGRYPPKNIVVEMARENQTTSRGKRNSKPRLKALEKAMKELGSNLLKEHPTDNQALRNDRLYLYYLQNGKDMYTGQELDIHNLSNYDIDHIIPQSFITDNSIDNRVLVSSTENRGKSDDVPSKEVVKKMKAFWEKLYRAGLISQRKFDNLTKAERGGLTEDDKARFIQRQLVETRQITKNVANILHQRFNSEKDEEGNTIRKVRIITLKSALTSQFRKQFGLYKVREVNDYHHAHDAYLNGVVATTLLKVYPQLEPEFVYGEYHKFNLRKLIAKSAFKENKATAKKQFYTNIMKFFAKDEPIIDGTVIERPVIETNKENGEILWDKSKYLATIKKVLNYHQMNIVKKVEIQKGGFSKETIKPKGNSNKLIPRKNNWDPKKYGGFDSPNVAYSVVITYDIEKGKKRKLKRVKEIVGITIMERTAFEKNPIAFLEEKGYQNPKEDVLMKLPKYTLYELENGRRRMLASAKEAQKGNQMVLPAHLVTLLYHAKHCDESNFNGESLEQKQAYVEEHRAEFSEILEHVIDFAERYTLADANLEKINKLFEQNQEADIKEIAQSFVNLMQFNAMGAPASFKFFEKTIERKRYTSIKELLNATIIYQSITGLYETRRRLGDLGED

SEQ ID NO: 149 - protein, 1368 aa, Artificial Sequence
  1368 residue - marginal ancestral sequence reconstruction method - node 88
MKKPYTIGLDIGTNSVGWAVLTDQYDLVKRKMKVAGNSEKKQIKKNFWGVRLFDEGETAADRRMNRTTRRRIERRRNRISYLQEIFAEEMSKVDANFFYRLEDSFYVESEKRHSRHPFFATIEEEVAYHENYRTIYHLREKLVNSSEKADLRLVYLALAHIIKYRGNFLIEGKLDTKNTSVDEVFKQFIQTYNQVFASDIRLEENKDVAKILSEKVTRREKLEKILKLYPGEKSTGMFAQFISLIVGSKGNFKKVFDLDEKTDIECAKDSYEEDLEALLAKIGDEYAEIFVAAKNAYNAVVLSSIITVTDTETKAKLSASMIERFDKHEKDLKQLKAFIKVHLPEKYNEIFNDVEKDGYAGYIDGKTKQEDFYKYMKKMLENIEGADYFIDKIEEENFLRKQRTFDNGAIPHQLHLEELEAILHQQAKYYPFLKENYEKIKSLVTFRIPYFVGPLANGQSEFAWLTRKADGEIRPWNIEEKVDFGKSAIDFIEKMTNKDTYLPKENVLPKHSLCYQKYMVYNELTKVRYIDDQGKTHQYFSGQEKQQIFNDLFKQKRKVKKKDLEQFLRNMSNHIESPTIEGVEDSFNSSFATYHDLLKVGVTQEILDNPLNAEMLEDIVKILTVFEDKRMIKEQLQQFSDVLDGAVLKKLERRHYTGWGRLSAKLLIGIRDKQSHLTILDYLMNDDGLNRNLMQLINDSNLSFKSIIEKEQVSTADKDIQSIVADLAGSPAIKKGILQSLKIVDELVGIMGGYPPQTIVVEMARENQTTGKGKNNSKPRFKSLEKAIKEFGSQILKEHPTDNQELRNDRLYLYYLQNGKDMYTGQELDIHNLSNYDIDHIVPQSFITDNSIDNRVLVSSAANREKGDDVPSLEVVRKRKVFWEKLYQANLMSKRKFDYLTKAERGGLTEADKARFIHRQLVETRQITKNVANILHQRFNCEKDENGNTIEQVRIVTLKSALVSQFRKQFQLYKVREVNDYHHAHDAYLNGVVANTLLKVYPQLEPEFVYGDYHQFDLRKLIAKSWFKANKATAKKQFYTNIMLFFAKKDRIIDGTVIERPVIETNKENGEILWDKSKYLDTIKKVLSYRQMNIVKKTEIQKGEFSKATIKPKGNSSKLIPRKANWDPMKYGGFDSPNMAYAVVIEYDIEKGKKKKIIKEKEIIRITIMERTAFEKDQKAFLEEKGYRNPKEDVLTKLPKYTLYECENGRRRMLASANEAQKGNQMVLPNHLVTLLYHAKNCEASNFDGKSLEQKQAYIESHREMFAELLAHVSEFAKRYTLADANLEKINQLFEQNKEGDIKVIAQSFVNLMAFNAMGAPASFKFFETTIERKRYNNLKELLNATIIYQSITGLYEARKRLDDLGED

SEQ ID NO: 150 - protein, 1368 aa, Artificial Sequence
  1368 residue - marginal ancestral sequence reconstruction method - node 89
MKKPYTIGLDIGTNSVGWAVLTDQYDLVKRKMKVAGNSEKKQIKKNFWGVRLFDEGETAADRRMNRTARRRIERRRNRISYLQEIFAEEMSKIDANFFCRLNDSFYVDSEKRNSRHPFFATIEEEVAYHKNYRTIYHLREELVNSSEKADLRLVYLALAHIIKYRGNFLIEGALDTKNTSVDGVYKQFIQTYNQVFASNIKLEENKDVAKILAEKVTRKEKLERILKLYPGEKSTGMFAQFISLIVGSKGNFQKVFDLVEKTDIECAKDSYEEDLEALLAIIGDEYAELFVAAKNAYNAVVLSSIITVTDTETNAKLSASMIERFDTHEKDLSELKAFIKLHLPKQYEEIFSNVEKDGYAGYIDGKTKQADFYKYMKTMLENIEGADYFIAKIEEENFLRKQRTFDNGAIPHQLHLEELEAILHQQAKYYPFLKENYDKIKSLVTFRIPYFVGPLANGQSEFAWLTRKADGEIRPWNIEEKVDFGKSAVDFIEKMTNKDTYLPKENVLPKHSLCYQKYMVYNELTKVRYIDDQGKTNQYFSGQEKQQIFNDLFKQKRKVKKKDLEQFLRNMSHHIESPTIEGLEDSFNSSYATYHDLLKVGIKQEILDNPLNTEMLEDIVKILTVFEDKRMIKEQLQQFSDVLDGAVLKKLERRHYTGWGRLSAKLLVGIRDKQSHLTILDYLMNDDGLNRNLMQLINDSNLSFKSIIEKEQVSTADKDIQSIVADLAGSPAIKKGILQSLKIVDELVSIMGGYPPQTIVVEMARENQTTGKGKNNSRPRYKSLEKAIKEFGSQILKEHPTDNQELRNNRLYLYYLQNGKDMYTGQELDIHNLSNYDIDHIVPQSFITDNSIDNLVLTSSAGNREKGDDVPPLEIVRKRKVFWEKLYQGNLMSKRKFDYLTKAERGGLTEADKARFIHRQLVETRQITKNVANILHQRFNYEKDDHGNTMEQVRIVTLKSALVSQFRKQFQLYKVREVNDYHHAHDAYLNGVVANTLLKVYPQLEPEFVYGDYHQFDLRKLIAKSWFKANKATAKKQFYTNIMLFFAQKDRIIDGTVIERPVIETNKENGEILWDKSKYLDTIKKVLSYRQMNIVKKTEIQKGEFSKATIKPKGNSSKLIPRKTNWDPMKYGGLDSPNMAYAVVIEYDIAKGKKKKIVFEKKIIRITIMERKAFEKDEKAFLEEQGYRQPKEDVLTKLPKYTLYECENGRRRMLASANEAQKGNQQVLPNHLVTLLHHAKNCEASNFDGKSLEQKQDYIESNREMFAELLAHVSEFAKRYTLADANLNKINQLFEQNKEGDIKVIAQSFVNLMAFNAMGAPASFKFFETTIERKRYNNLKELLNATIIYQSITGLYEARKRLDDLGED

SEQ ID NO: 151 - protein, 1368 aa, Artificial Sequence
  1368 residue - marginal ancestral sequence reconstruction method - node 90
MKKPYTIGLDIGTNSVGWAVLTDQYDLVKRKMKVAGNSEKKQIKKNFWGVRLFDEGETAADRRMNRTTRRRIERRRNRISYLQEIFAAEMSEVDANFFYRLEDSFYIESEKRHSRHPFFATIEEEVAYHENYRTIYHLREKLVNSSDKADLRLVYLALAHIIKYRGNFLIEGKLDTKNTSVDEVFKQFIQTYNQVFASDIRLEENKEVAKILSEKLTRREKLDKILKLYPGEKSTGMFAQFISLIIGSKGNFKKVFDLDEKTDIECAKDSYEEDLEALLAKIGDEYAEIFVAAKNAYNAVVLSSIITVTDTETKAKLSASMIERFDKHEKDLKRLKAFFKVHLPEKFNEVFNDVEKDGYAGYIDGKTKQEDFYKYMKKMLENIEGADYFIDQIEEENFLRKQRTFDNGAIPHQLHLEELEAILHQQAKYYPFLKEDYEKIKSLVTFRIPYFVGPLANGQSEFAWLTRKADGEIRPWNIEEKVDFGKSAIDFIEKMTNKDTYLPKENVLPKHSLCYQKYMVYNELTKIRYIDDQGKTHQYFSGQEKQQIFNDLFKQKRKVKKKDLEQFLYNMINHIESPTIEGVEDAFNSSFATYHDLQKVGVTQEILDNPLNAEMLEEIVKILTVFEDKRMIKEQLQQFSDVLDGAVLKKLERRHYTGWGRLSAKLLIGIRDKQSHLTILDYLMNDDGLNRNLMQLINDSNLSFKSIIEKEQVSTADKDIQSIVADLAGSPAIKKGILQSLKIVDELVGIMGGYPPQTIVVEMARENQTTGKGKNNSKPRFTSLEKAIKEFGSQILKEHPTDNQGLKNDRLYLYYLQNGKDMYTGQELDIHNLSNYDIDHIVPQSFITDNSIDNRVLVSSAANREKGDNVPSLEVVRKRKVFWEKLYQAKLMSKRKFDYLTKAERGGLTEADKARFIHRQLVETRQITKNVANILHQRFNCKKDENGNVIEQVRIVTLKSALVSQFRKQFQLYKVREVNDYHHAHDAYLNGVVANTLLKVYPQLEPEFVYGDYHQFDLRKLIAKSWFKANKATAKKQFYTNIMLFFAKKDRIIDGTVIERPVIETNKENGEILWDKSKYLDTIKKVLSYRQMNIVKKTEIQKGEFSNATVNPKGNSSKLIPRKADWDPIKYGGFDGSNMAYAIVIEYDIEKRKKKTVIKEKELIQINIMERTAFEKDQKAFLEEKGYRNPKEDVLTKIPKYTLYECENGRRRMLGSANEAQKGNQMVLPNHLMTLLYHAKNCEASNFDGKSLEQKQAYIESHREMFAELLAHISEFAKRYTLADANLEKINTLFEQNKEGDIKVIAQSFVNLMAFNAMGAPASFKFFETTIERKRYNNLKELLNATIIYQSITGLYEARKRLDDLGED

SEQ ID NO: 152 - protein, 1368 aa, Artificial Sequence
  1368 residue - marginal ancestral sequence reconstruction method - node 91
MKKPYSIGLDIGTNSVGWAVITDDYKVPAKKMKVLGNTDKQSIKKNLLGALLFDSGETAEATRLKRTARRRYTRRRNRICYLQEIFSEEMNKVDDSFFHRLDESFLVPEDKKYDRHPIFGNLAEEVAYHEQYPTIYHLRKHLADSTEKADLRLVYLALAHIIKFRGHFLIEGDLNAENTDVQKLFQQFVEVYNQTFEESHLSEETIDVEEILTEKISKSRRLENLIKHFPNEKKNGLFGNLIALILGLQPNFKTNFDLSEDAKLQFSKDTYEEDLENLLAQIGDEYADLFLAAKNLYDAILLSGILTVTDNSTKAPLSASMIKRYEEHQKDLAQLKQFIKEHLPDKYNEIFSDKSKNGYAGYIEGKTSQEDFYKYLKKILSKIDGAEYFLDKIDREDFLRKQRTFDNGSIPHQIHLQELHAILRRQGEYYPFLKENQEKIEKILTFRIPYYVGPLARGNSRFAWLTRKSDEKITPWNFDEVVDKESSAEAFIERMTNYDTYLPNEKVLPKHSLLYETFTVYNELTKVKYVTERGKTQQFFSAEQKQEIFDHLFKKNRKVTKKKLKDYLEKEFEEFDSVDITGVEDEFNASLGTYHDLLKILKDKDFLDDEENEEILEDIVLTLTLFEDREMIRKRLEKYSDLFTKEQLKKLERRHYTGWGRLSRKLINGIRDKQSGKTILDYLIDDGSSNRNFMQLINDDSLSFKEEIEKAQVIGETDNLHEVVQDLAGSPAIKKGILQSLKIVDELVKVMGRHNPENIVVEMARENQTTNRGRRNSRQRLKRLEEALKNLGSNILKEHPVDNQQLQNDRLYLYYLQNGKDMYTGEELDIDNLSQYDIDHIIPQSFIKDNSIDNRVLTSSEENRGKSDNVPSIEVVRKMKSFWQKLLNAGLISQRKFDNLTKAERGGLTEDDKAGFIKRQLVETRQITKHVAQILDSRFNTERDENDKRIRNVKIITLKSNLVSQFRKDFGLYKVREINDYHHAHDAYLNAVVGTALLKKYPKLEPEFVYGDYKKYNLRKLIAKSDRERGKATAKMFFYSNIMNFFKTEVKLADGTVIERPVIETNKETGEIVWDKEKDFATVRKVLSYPQVNIVKKVEVQTGGFSKESILPKGNSDKLIPRKNNWDPKKYGGFDSPTVAYSVLVVADVEKGKAKKLKTVKELVGITIMERSAFEKNPIAFLEKKGYQNIQEDLIIKLPKYSLFELENGRRRLLASAKELQKGNEMVLPAHLVTLLYHAKRIDKSNGNSENLEQKQEYVEKHKNEFDELLDYIIDFSEKYILADKNLEKIKELYDQNDDADINELASSFINLLTFTALGAPAAFKFFGETIDRKRYTSTKEVLNATLIHQSITGLYETRIDLSKLGED

SEQ ID NO: 153 - protein, 1368 aa, Artificial Sequence
  1368 residue - marginal ancestral sequence reconstruction method - node 92
MKKPYSIGLDIGTNSVGWAVITDDYKVPAKKMKVLGNTDRQSIKKNLIGALLFDSGETAEATRLKRTARRRYTRRKNRICYLQEIFSEEMAKVDDSFFHRLEESFLVPEDKKYDRHPIFGNLADEVAYHENYPTIYHLRKKLADSTEKADLRLIYLALAHIIKFRGHFLIEGDLNAENTDVQKLFHQLVDTYNQLFEEDQLDTETIDAKAILTAKISKSRRLENLISQIPGQKKNGLFGNLIALSLGLTPNFKSNFDLSEDAKLQLSKDTYEEDLDNLLAQIGDQYADLFLAAKNLSDAILLSDILTVNDESTKAPLSASMIKRYEEHQQDLALLKQLVKEQLPEKYKEIFSDKSKNGYAGYIDGKTSQEEFYKYIKPILSKLDGAEEFLAKIDREDFLRKQRTFDNGSIPHQIHLEELHAILRRQEEYYPFLKDNQEKIEKILTFRIPYYVGPLARGNSRFAWLTRKSDEAITPWNFEEVVDKEASAQAFIERMTNFDTYLPNEKVLPKHSLLYETFTVYNELTKVKYVTEGMTKPQFLSAEQKQAIVDLLFKKNRKVTVKQLKEDYFKKIECFDSVDITGVEDRFNASLGTYHDLLKIIKDKDFLDNEENEDILEDIVLTLTLFEDREMIEKRLAKYADLFDKKVLKKLKRRHYTGWGRLSRKLINGIRDKQSGKTILDFLKADGFANRNFMQLINDDSLSFKEEIEKAQVIGQTDSLHEVVADLAGSPAIKKGILQTIKIVDELVKVMGRHNPENIVIEMARENQTTAQGIKNSRQRMKRLEEVLKKLGSNILKEHPVDNTQLQNDRLYLYYLQNGKDMYTGQELDIDNLSQYDIDHIIPQSFIKDNSIDNKVLTSSEENRGKSDNVPSIEVVRKMKSYWQKLLNAGLISQRKFDNLTKAERGGLTESDKAGFIKRQLVETRQITKHVAQILDSRFNTERDENDKPIRNVKIITLKSKLVSDFRKDFGLYKVREINDYHHAHDAYLNAVVGTALLKKYPKLEPEFVYGDYKKYDLRKLIAKSDKERGKATAKMFFYSNIMNFFKTEVKLANGTIIKRPVIETNEETGEIVWDKEKDFATVRKVLSYPQVNIVKKTEVQTGGFSKESILPKGNSDKLIPRKNNWDPKKYGGFDSPTVAYSVLVVAKVEKGKAKKLKTVKELVGITIMERSAFEKNPIAFLEAKGYQDIQEDLIIKLPKYSLFELENGRRRLLASAKELQKGNEMVLPAHLVTFLYHASRIDKSTGSSENLEQKQEYVEQHKHEFDEILDYIIDFSERYILADKNLEKIKSLYNQNDDSDINELASSFINLFTFTALGAPAAFKFFDATIDRKRYTSTKEVLNATLIHQSITGLYETRIDLSQLGGD

SEQ ID NO: 154 - protein, 1368 aa, Artificial Sequence
  1368 residue - marginal ancestral sequence reconstruction method - node 93
MKKPYSIGLDIGTNSVGWAVITDDYKVPAKKMKVLGNTDRQSIKKNLIGALLFDSGETAEATRLKRTARRRYTRRKNRICYLQEIFSNEMAKVDDSFFHRLEESFLVEEDKKYERHPIFGNLADEVAYHENYPTIYHLRKKLADSTEKADLRLIYLALAHIIKFRGHFLIEGDLNAENTDVQKLFHQLVDTYNQLFEEDQLDTEAIDAKAILTAKISKSRRLENLISQIPGQKKNGLFGNLIALSLGLTPNFKSNFDLSEDAKLQLSKDTYDEDLDNLLAQIGDQYADLFLAAKNLSDAILLSDILTVNDESTKAPLSASMIKRYEEHHQDLALLKQLVKEQLPEKYKEIFSDESKNGYAGYIDGKTSQEEFYKYIKPILEKLDGAEEFLAKINREDFLRKQRTFDNGSIPHQIHLGELHAILRRQEEYYPFLKDNQEKIEKILTFRIPYYVGPLARGNSRFAWLTRKSDEAITPWNFEEVVDKEASAQAFIERMTNFDEYLPNEKVLPKHSLLYEYFTVYNELTKVKYVTEGMTKPEFLSAEQKQAIVDLLFKKNRKVTVKQLKEDYFKKIECFDSVDISGVEDRFNASLGTYHDLLKIIKDKDFLDNEENEDILEDIVLTLTLFEDREMIEKRLATYADLFDKKVLKQLKRRHYTGWGRLSRKLINGIRDKQSGKTILDFLKADGFANRNFMQLINDDSLSFKEEIEKAQVSGQTDSLHEQIADLAGSPAIKKGILQTIKIVDELVKVMGRHNPENIVIEMARENQTTAKGIKNSRERMKRIEEVLKKLGSQILKEHPVENTQLQNERLYLYYLQNGKDMYTGQELDINNLSQYDIDHIIPQSFIKDDSIDNKVLTRSEENRGKSDNVPSIEVVKKMKSYWQKLLNAKLISQRKFDNLTKAERGGLSESDKAGFIKRQLVETRQITKHVAQILDSRFNTERDENDKPIRNVKVITLKSKLVSDFRKDFGFYKVREINDYHHAHDAYLNAVVGTALLKKYPKLESEFVYGDYKKYDLRKMIAKSDKERGKATAKMFFYSNIMNFFKTEVKLANGTIIKRPLIETNEETGEIVWDKEKDFATVRKVLSMPQVNIVKKTEVQTGGFSKESILPKGNSDKLIPRKNNWDPKKYGGFDSPTVAYSVLVVAKVEKGKAKKLKTVKELVGITIMERSAFEKNPIAFLEAKGYQDIQEDLIIKLPKYSLFELENGRRRLLASATELQKGNEMVLPAHLVTFLYHASRIDKSTGSSENLEQKQEYVEQHKHEFDEILDYIIDFSERYILADKNLEKIKSLFNQNDDSDINELASSFINLFTFTSLGAPAAFKFLDTTIDRKRYTSTKEVLNATLIHQSITGLYETRIDLSQLGGD

SEQ ID NO: 155 - protein, 1368 aa, Artificial Sequence
  1368 residue - marginal ancestral sequence reconstruction method - node 94
MEKKYSIGLDIGTNSVGWAVITDDYKVPSKKFKVLGNTDRKSIKKNLIGALLFDSGETAEATRLKRTARRRYTRRKNRICYLQEIFSNEMAKVDDSFFHRLEESFLVEEDKKHERHPIFGNLADEVAYHENYPTIYHLRKKLADSTEKADLRLIYLALAHIIKFRGHFLIEGDLNAENSDVDKLFYQLVQTYNQLFEENPLDASGVDAKAILSARLSKSRRLENLIAQFPGEKKNGLFGNLIALSLGLTPNFKSNFDLAEDAKLQLSKDTYDDDLDNLLAQIGDQYADLFLAAKNLSDAILLSDILRVNSEITKAPLSASMIKRYDEHHQDLALLKALVRQQLPEKYKEIFSDQSKNGYAGYIDGGASQEEFYKFIKPILEKMDGAEELLAKLNREDLLRKQRTFDNGSIPHQIHLGELHAILRRQEEFYPFLKDNREKIEKILTFRIPYYVGPLARGNSRFAWLTRKSEETITPWNFEEVVDKGASAQSFIERMTNFDENLPNEKVLPKHSLLYEYFTVYNELTKVKYVTEGMRKPEFLSGEQKKAIVDLLFKTNRKVTVKQLKEDYFKKIECFDSVEISGVEDRFNASLGTYHDLLKIIKDKDFLDNEENEDILEDIVLTLTLFEDREMIEERLKTYAHLFDDKVMKQLKRRHYTGWGRLSRKLINGIRDKQSGKTILDFLKSDGFANRNFMQLIHDDSLTFKEEIQKAQVSGQGDSLHEQIADLAGSPAIKKGILQTVKIVDELVKVMGRHKPENIVIEMARENQTTTKGLKNSRERMKRIEEGIKELGSQILKEHPVENTQLQNEKLYLYYLQNGRDMYVDQELDINRLSDYDVDHIVPQSFIKDDSIDNKVLTRSDENRGKSDNVPSEEVVKKMKNYWRQLLNAKLITQRKFDNLTKAERGGLSEADKAGFIKRQLVETRQITKHVAQILDSRMNTKRDENDKPIREVKVITLKSKLVSDFRKDFQFYKVREINNYHHAHDAYLNAVVGTALIKKYPKLESEFVYGDYKVYDVRKMIAKSEQEIGKATAKRFFYSNIMNFFKTEVKLANGEIRKRPLIETNGETGEIVWDKEKDFATVRKVLSMPQVNIVKKTEVQTGGFSKESILPKRNSDKLIPRKKDWDPKKYGGFDSPTVAYSVLVVAKVEKGKAKKLKSVKELVGITIMERSSFEKNPIGFLEAKGYKDIQKDLIIKLPKYSLFELENGRRRMLASATELQKGNEMVLPAHLVTFLYHASKIEKSTGSSENLEQKQAYIEQHKHEFDEILEYIIDFSERYILADKNLSKVKSLFNKHEDSDISELASSFINLFTFTSLGAPAAFKFLDTTIDRKRYTSTKEVLDATLIHQSITGLYETRIDLSQLGGD

SEQ ID NO: 156 - protein, 1368 aa, Artificial Sequence
  1368 residue - marginal ancestral sequence reconstruction method - node 95
MDKKYSIGLDIGTNSVGWAVITDDYKVPSKKFKVLGNTDRHSIKKNLIGALLFDSGETAEATRLKRTARRRYTRRKNRICYLQEIFSNEMAKVDDSFFHRLEESFLVEEDKKHERHPIFGNIVDEVAYHEKYPTIYHLRKKLADSTDKADLRLIYLALAHMIKFRGHFLIEGDLNPDNSDVDKLFIQLVQTYNQLFEENPINASGVDAKAILSARLSKSRRLENLIAQLPGEKKNGLFGNLIALSLGLTPNFKSNFDLAEDAKLQLSKDTYDDDLDNLLAQIGDQYADLFLAAKNLSDAILLSDILRVNSEITKAPLSASMIKRYDEHHQDLTLLKALVRQQLPEKYKEIFFDQSKNGYAGYIDGGASQEEFYKFIKPILEKMDGTEELLAKLNREDLLRKQRTFDNGSIPHQIHLGELHAILRRQEDFYPFLKDNREKIEKILTFRIPYYVGPLARGNSRFAWMTRKSEETITPWNFEEVVDKGASAQSFIERMTNFDKNLPNEKVLPKHSLLYEYFTVYNELTKVKYVTEGMRKPAFLSGEQKKAIVDLLFKTNRKVTVKQLKEDYFKKIECFDSVEISGVEDRFNASLGTYHDLLKIIKDKDFLDNEENEDILEDIVLTLTLFEDREMIEERLKTYAHLFDDKVMKQLKRRHYTGWGRLSRKLINGIRDKQSGKTILDFLKSDGFANRNFMQLIHDDSLTFKEDIQKAQVSGQGDSLHEQIANLAGSPAIKKGILQTVKVVDELVKVMGRHKPENIVIEMARENQTTQKGQKNSRERMKRIEEGIKELGSQILKEHPVENTQLQNEKLYLYYLQNGRDMYVDQELDINRLSDYDVDHIVPQSFIKDDSIDNKVLTRSDKNRGKSDNVPSEEVVKKMKNYWRQLLNAKLITQRKFDNLTKAERGGLSELDKAGFIKRQLVETRQITKHVAQILDSRMNTKYDENDKLIREVKVITLKSKLVSDFRKDFQFYKVREINNYHHAHDAYLNAVVGTALIKKYPKLESEFVYGDYKVYDVRKMIAKSEQEIGKATAKRFFYSNIMNFFKTEITLANGEIRKRPLIETNGETGEIVWDKGRDFATVRKVLSMPQVNIVKKTEVQTGGFSKESILPKRNSDKLIARKKDWDPKKYGGFDSPTVAYSVLVVAKVEKGKAKKLKSVKELVGITIMERSSFEKNPIDFLEAKGYKDVQKDLIIKLPKYSLFELENGRRRMLASAGELQKGNEMVLPAKLVTFLYHASHIEKSKGSPENNEQKQAYIEQHKHDLDEILEYISEFSKRYILADKNLSKVKSLFNKHEDSSISELASSIINLFTLTSLGAPAAFKFLDTTIDRKRYTSTKEVLDATLIHQSITGLYETRIDLSQLGGD

SEQ ID NO: 157 - protein, 1368 aa, Artificial Sequence
  1368 residue - marginal ancestral sequence reconstruction method - node 96
MKKPYSIGLDIGTNSVGWAVITDDYKVPAKKMKVLGNTDRKTIKKNLIGALLFDSGETAEATRLKRTARRRYTRRKNRICYLQEIFSEEMAKVDDSFFQRLEESFLVPEDKEYDRHPIFGNLADEVAYHKNYPTIYHLRKKLADSTQKADLRLIYLALAHIIKFRGHFLIEGDLNSENTDVQKLFHQLVDTYNLLFEEDPLDTETIDAKAILTAKISKSRRLENLISQIPGQKKNGLFGNLIALSLGLTPNFKSNFGLSEDAKLQLSKDTYEEDLDNLLAQIGDQYADLFLAAKNLSDAILLSDILTVSDENTKAPLSASMIKRYEEHQQDLALLKQLVKEQLPEKYKEIFSDKSKNGYAGYIDGKTSQEEFYKYIKPILSKLDGAEEFLAKIDREDFLRKQRTFDNGSIPHQIHLEELHAILRRQEEYYPFLKDNQEKIEKLLTFRIPYYVGPLARGNSRFAWLKRKSDEAITPWNFEEVVDQEASAQAFIERMTNFDTYLPNEKVLPKHSLLYETFTVYNELTKVKYVTEGMTKPQFLSAEQKQAIVDLLFKKNRKVTVKQLKENYFKKIECFDSVDITGVEDRFNASLGTYHDLLKIIKDKDFLDNEENQDILEDIVLTLTLFEDKKMIEKRLAKYADLFDKSVLKKLKRRHYTGWGRLSRKLINGIRDKQSGKTILDFLKADGFANRNFMQLINDSSLSFKEEIEKAQVIGKTESLKEVVANLAGSPAIKKGILQTIKIVDELVKVMGRHNPENIVIEMARENQTTAQGIKNSRQRMKKLEEVLKKLGSNILKEHPVDNTQLQNDRLYLYYLQNGKDMYTGQDLDIDNLSQYDIDHIIPQSFIKDNSIDNKVLTSQEANRGKSDNVPSIEVVRKMKSYWQKLLKAGAISQRKFDNLTKAERGGLTESDKAGFIKRQLVETRQITKHVAQILDSRFNTELDENNKRIRNVKIITLKSKLVSDFRKDFGLYKVREINDYHHAHDAYLNAVVGTALLKKYPKLEPEFVYGDYKKYDLRKLIAKSDKERGKATAKMFFYSNIMNFFKTEVKLANGTIIKRPVIETNTETGEIVWDKEKDFATIRKVLSYPQVNIVKKTEVQTGGFSKESILPKGNSDKLIPRKNNWDPKKYGGFDSPTVAYSVLVVAKVEKGKAKKLKTVKELVGITIMERSAFEKNPIAFLEAKGYQDIQEHLIIKLPKYSLFELENGRRRLLASAKELQKGNELVLPAHYVTFLYLASRYDKLTGSSEDLEQKKHFVEQHLHYFDEILDIIIDFSERYILADSNLEKIKSLYNQNDDFSINEQASNMINLFTFTALGAPAAFKFFDATIDRKRYTSTKEVLNATLIHQSITGLYETRIDLSQLGGD

SEQ ID NO: 158 - protein, 1368 aa, Artificial Sequence
  1368 residue - marginal ancestral sequence reconstruction method - node 97
MRKPYSIGLDIGTNSVGWAVITDDYKVPAKKMKVLGNTDRKTIKKNLIGALLFDSGETAEATRLKRTARRRYTRRKNRICYLQNIFSDEMAKVDDAFFQRLSESFLVPEDKEFDRHPIFGNLKDEVAYHKNYPTIYHLRKKLADSDQKADLRLIYLALAHIIKFRGHFLIEGDLNSENTDVQKLFLQLVDTYNLLFEEDPIDTETIDAKAILTAKTSKSRRLENLISEIPGQKKNGLFGNLIALSLGLTPNFKSNFGLSEDAKLQISKDTYEEDLDNLLAQIGDQYADLFLAAKNLSDAILLSDILTVSDENTKAPLSASMVKRYEEHQQDLALLKKLVKEQLPEKYKEIFSNKEKNGYAGYIDGKTSQEDFYKYIKPILSKLDGAEEFLAKIDREDFLRKQRTFDNGSIPHQIHLKELHAILRRQEKYYPFLKENQEKIEKLLTFRIPYYVGPLAKGNSSFAWLKRRSDESITPWNFEEVVDQEASAQAFIERMTNFDTYLPEEKVLPKHSPLYEMFTVYNELTKVKYVTEGMTKPQFLSAEQKEAIVDLLFKKNRKVTVKQLKENYFSKIECFDSVDITGVEDRFNASLGTYHDLLKIIKDKAFLDDEANQDILEDIVLTLTLFEDEKMIEKRLAKYADLFDKSVLKKLKKRHYTGWGRLSRKLINGIRDKQSGKTILDFLKADGFANRNFMQLINDSSLDFAKIIENAQEKAKSESLKETVANLAGSPAIKKGILQSIKIVDEIVKVMGRHNPDNIVIEMARENQTTAQGIKNSRQRLKKLEEVHKKTGSKILKEHSVSNTQLQNDRLYLYLLQDGKDMYTGQDLDIDNLSQYDIDHIIPQSFIKDNSIDNIVLTSQEANRGKSDNVPSIEVVRKMKSYWQKQLKSGAISQRKFDHLTKAERGGLSESDKAGFIKRQLVETRQITKHVAQILDSRFNSKLDENNKSIRNVKIITLKSKMVSDFRKDFGLYKLREVNDYHHAHDAYLNAVVGTALLKKYPKLEAEFVYGDYKHYDLAKLIAKSDSSLGKATAKMFFYSNIMNFFKKEVKLADGTIIKRPVIETNTETGEIVWDKVKDFKTIRKVLSYPQVNIVKKTEVQTGGFSKESILPKGNSDKLIPRKNNWDPKKYGGFDSPTIAYSVLVVAKVAKGKAQKLKTVKELVGITIMEQSEFEKDPIAFLEKKGYQDIQENLIIKLPKYSLFELENGRRRLLASAKELQKGNELALPNKYVKFLYLASRYDKLTGKSEDREQKKHFVEQHLHYFDEILDIIVDFSNRYILADSNLEKIKSLYNEKDDFSINEQATNMLNLFTFTSLGAPAAFKFFDATIDRKRYTSTNEVLNSTLIHQSITGLYETRIDLSKLGGD

SEQ ID NO: 159 - protein, 1368 aa, Artificial Sequence
  1368 residue - marginal ancestral sequence reconstruction method - node 98
MRKPYSIGLDIGTNSVGWAVITDDYKVPAKKMKVLGNTDRQTIKKNLIGALLFDSGETAEATRLKRTARRRYTRRKNRIKYLQNIFSDEMSKVDSAFFQRLSESFLVPDDKEFDRHPIFGNLKDEVAYHKNYPTIYHLRKKLADSDQKADLRLIYLALAHIIKFRGHFLIEGDLDSENTDVHALFLKLVDTYNLLFEEDKIDTETIDAKAILTAKTSKSRRLENLIAEIPNQKKNTLFGNLISLSLGLTPNFKTNFELSEDAKLQISKDSYEEDLDNLLAQIGDQYADLFIAAKNLSDAILLSDILTVKGANTKAPLSASMVQRYEEHQQDLALLKKLVKEQLPEKYKEIFDNKEKNGYAGYIDGKTSQEDFYKYIKPILSKLDGAEKLISKLEREDFLRKQRTFDNGSIPHQIHLNELKAIIRRQEKYYPFLKENQEKIEKLFTFRIPYYVGPLANGNSSFAWLKRRSNESITPWNFEEVVDQEASARAFIERMTNFDTYLPEEKVLPKHSPLYEMFTVYNELTKVKYQTEGMKKPEFLSSEEKEEIVNLLFKKERKVTVKQLKENYFSKIKCFDSVTISGVEDRFNASLGTYHDLLKIIKDKAFLDDEANQDILEDIVLTLTLFEDEKMIEKRLAKYADVFDKSVLKKLKKRHYTGWGRLSQKLINGIRDKQTGKTILDFLKDDGVANRNFMQLINDSSLDFAKIIKNAQEKTKSESLEETIANLAGSPAIKKGILQSIKIVDEIVKVMGRHNPDNIVIEMARENQSTAQGIKNSRQRLRKLEEVHKNTGSKILKEHNVSNTQLQSDRLYLYLLQDGKDMYTGKDLDFDNLSQYDIDHIIPQSFIKDNSIDNIVLTSQESNRGKSDNVPSIEIVNKMKSYWQKQLKSGAISQRKFDHLTKAERGGLSEFDKAGFIKRQLVETRQITKHVAQILDSRFNSNLDENSKSNRNVKIITLKSKMVSDFRKDFGFYKLREVNDYHHAHDAYLNAVVGTALLKKYPKLEAEFVYGDYKHYDLAKLIVKSDSSLGKATAKMFFYSNIMNFFKKEVKLADGTIITRPQIETNTETGEIVWDKVKDIKTIRKVLSYPQVNIVKKTEVQTGGFSKESILPKGDSDKLIPRKNNWDPKKYGGFDSPIIAYSVLVVAKVAKGKAQKLKTVKELVGITIMEQNEFEKDPIAFLEKKGYQDIQESLIIKLPKYSLFELENGRKRLLASAKELQKGNELALPNKYVKFLYLASRYTKFTGKEEDREKKRHFVESHLHYFDEIMDIIVDFSNRYILADSNLEKIQNLYNEKDNFSIEEQATNMLNLFTFTGLGAPAAFKFFNADIDRKRYTSTNEILNSTLIHQSITGLYETRIDLSKLGGD

SEQ ID NO: 160 - protein, 1368 aa, Artificial Sequence
  1368 residue - marginal ancestral sequence reconstruction method - node 99
MKKPYSIGLDIGTNSVGWAVITDDYKVPAKKMKVLGNTDKQSIKKNLLGALLFDSGETAEATRLKRTARRRYTRRRNRIRYLQEIFSEEMNKVDDSFFHRLDESFLVPEDKRGDRHPIFGNLAEEVAYHEQFPTIYHLRKHLADSTEKADLRLVYLALAHMIKFRGHFLIEGDLNAENTDVQKLFQDFVEVYDRTFEESHLSEETIDVEEILTEKISKSRRLENLIKHFPNEKKNGLFGNLIALILGLQPNFKTNFDLSEDAKLQFSKDTYEEDLENLLGQIGDEYADLFLAAKNLYDAILLSGILTVTDNSTKAPLSASMIKRYEEHQKDLAQLKQFIKENLPDKYNEIFSDKSKNGYAGYIEGKTSQEDFYKYLKNILSKIDGSEYFLDKIDREDFLRKQRTFDNGSIPHQIHLQEMHAILRRQGEYYPFLKENQEKIEKILTFRIPYYVGPLARGNSRFAWLTRKSDEKITPWNFDEVVDKESSAEAFINRMTNYDLYLPDEKVLPKHSLLYETFTVYNELTKVKYVTEQGKTQQFFDANMKQEIFDHLFKENRKVTKKKLLDYLEKEFEEFRIVDLTGLDKEFNASLGTYHDLLKILKDKDFLDDEENEEILEDIVLTLTLFEDREMIRKRLEKYSDIFTKEQLKKLERRHYTGWGRLSAKLINGIRDKQSGKTILDYLIDDGSSNRNFMQLINDDALSFKEEIQKAQVIGETDNLKQVVQDLAGSPAIKKGILQSLKIVDELVKVMGGHNPENIVVEMARENQTTNRGRRNSQQRLKRLEDALKNLGSNILKEHPVDNQQLQNDRLFLYYLQNGKDMYTGEELDIDNLSQYDIDHIIPQAFIKDDSIDNRVLTSSAENRGKSDNVPSIEVVRKMKSFWQKLLNAGLISQRKFDNLTKAERGGLTEDDKAGFIKRQLVETRQITKHVAQILDARFNTERDENDKRIRNVKIITLKSNLVSQFRKEFELYKVREINDYHHAHDAYLNAVVGTALLKKYPKLEPEFVYGDYKKYNLRKLIAKSYRERGKATAKMFFYSNIMNFFKTEVKLADGTVIERPVIEVNKETGEIVWDKEKDFATVRKVLSYPQVNIVKKVEVQTGGFSKESILPKGNSDKLIPRKIYWDPKKYGGFDSPTVAYSVLVVADIEKGKAKKLKTVKELVGITIMERSAFEKNPVAFLEKKGYQNIQEDNIIKLPKYSLFELENGRRRLLASAKELQKGNEMVLPAHLVTLLYHAKRIDKSNGEPEHLEQKQEYVEKHKNEFKELLDYISDFSEKYILADKNLEKIKELYDQNDDADINELASSFINLLTFTALGAPAAFKFFGKNIDRKRYTSTKEVLNATLIHQSITGLYETRIDLSKLGED

SEQ ID NO: 161 - protein, 1368 aa, Artificial Sequence
  1368 residue - marginal ancestral sequence reconstruction method - node 100
MKKPYSIGLDIGTNSVGWAVITDDYKVPAKKMKVLGNTDKQSIKKNLLGALLFDSGETAEATRLKRTARRRYTRRKNRLRYLQEIFAEEMNKVDDSFFHRLDESFLVPEDKRGDRHPIFGNIAEEVAYHQKFPTIYHLRKHLADSSEKADLRLVYLALAHMIKFRGHFLIEGDLNAENTDVQKLFADFVEVYDRTFEESHLSEITVDAEEILTEKVSKSRRLENLIKHYPTEKKNTLFGNLIALALGLQPNFKTNFQLSEDAKLQFSKDTYEEDLEELLGKIGDEYADLFTAAKNLYDAILLSGILTVNDNSTKAPLSASMIKRYEEHQKDLAQLKQFIKENVPDQYNDIFKDKSKNGYAGYIENGVKQEDFYKYLKGILSKINGSEYFLDKIDREDFLRKQRTFDNGSIPHQIHLQEMHAILRRQGEYYPFLKENQEKIEKILTFRIPYYVGPLARKGSRFAWASYKSDEKITPWNFDEVVDKEKSAEKFITRMTSNDLYLPEEKVLPKHSLLYETFTVYNELTKVKYVNEQGKAQQFFDANMKQEIFDHVFKENRKVTKEKLLNYLNKEFEEFRIVDLTGLDKEFNASLGTYHDLKKILKDKSFLDDEANEEIIEDIVLTLTLFEDREMIRKRLEKYSDIFTKEQLKKLERRHYTGWGRLSYKLINGIRNKESGKTILDYLIDDGSANRNFMQLINDDALSFKEEIQKAQVIGEVDDLAQVVHDLAGSPAIKKGILQSVKIVDELVKVMGNHNPENIVIEMARENQTTNRGRRNSQQRLKRLQDSLKNLGSNILKEKPVDNQQLQNDRLFLYYLQNGKDMYTGEELDIDNLSQYDIDHIIPQAFIKDDSIDNRVLTSSAENRGKSDNVPSIEVVRARKSFWVKLLKAGLISQRKFDNLTKAERGGLTEDDKAGFIKRQLVETRQITKHVAQILDARFNTERDENDKVIRNVKIITLKSNLVSQFRKEFELYKVREINDYHHAHDAYLNAVVGTALLKKYPKLAPEFVYGEYKKYNLRKLIAKSHRERGKATAKMFFYSNLMNFFKTEVKLADGTVIERPVIEVNKETGEIVWDKEKDFATVRKVLSYPQVNIVKKVEVQTGGFSKESILPKGDSDKLIPRKIYWDPKKYGGFDSPTVAYSVLVVADIEKGKAKKLKTVKELVGITIMERSAFEKNPVAFLEKKGYHNIQEDKIIKLPKYSLFELENGRRRLLASAKELQKGNEMVLPAHLVTLLYHAQRIDKSNGEPEHLEQKQEYVEKHKNEFKELLDYISDFSEKYVLADKNLEKIKALYDQNDDADIEEIASSFINLLTFTALGAPAAFKFFGENIDRKRYTSTKECLNATLIHQSITGLYETRIDLSKLGED

SEQ ID NO: 162 - protein, 1368 aa, Artificial Sequence
  1368 residue - marginal ancestral sequence reconstruction method - node 101
MKKPYSIGLDIGTNSVGWAVITDDYKVPAKKMKVLGNTDKQSIKKNLLGALLFDSGETAEATRLKRTARRRYTRRKNRLRYLQEIFAEEMNKVDESFFQRLDESFLVDEDKRGDRHPIFGNIAEEVAYHQKFPTIYHLRKHLADSSEKADLRLVYLALAHMIKFRGHFLIEGDLNAENTDVQKLFADFVEVYDRTFEESHLSEITVDAASILTEKVSKSRRLENLIKHYPTEKKNTLFGNLIALALGLQPNFKTNFQLSEDAKLQFSKDTYEEDLEELLGKIGDEYADLFTSAKNLYDAILLSGILTVDDNSTKAPLSASMIKRYEEHQKDLEKLKEFIKVNAPDQYNDIFKDKSKNGYAGYIENGVKQDEFYKYLKGILSKINGSEYFLDKIDREDFLRKQRTFDNGSIPHQIHLQEMHAILRRQGEYYPFLKENQDKIEKILTFRIPYYVGPLARKGSRFAWAEYKSDEKITPWNFDEVVDKEKSAEKFITRMTLNDLYLPEEKVLPKHSLLYETFTVYNELTKVKYVNEQGKAKQFFDANMKQEIFDHVFKENRKVTKEKLLNYLNKEFEEFRIVDLTGLDKEFNASLGTYHDLKKILKDKSFLDDKANEEIIEDIIQTLTLFEDREMIRQRLQKYSDIFTKEQLKKLERRHYTGWGRLSYKLINGIRNKENNKTILDYLIDDGSANRNFMQLINDDALSFKEEIQKAQVIGDVDDIANVVHDLPGSPAIKKGILQSVKIVDELVKVMGNHNPENIVIEMARENQTTNRGRRNSQQRLKRLQDSLKNLGSNINKKKPVENQQLQNDRLFLYYIQNGKDMYTGEELDIDNLSQYDIDHIIPQAFIKDDSIDNRVLTSSAENRGKSDDVPSIEVVRARKSFWVKLLKAGLISQRKFDNLTKAERGGLTEDDKAGFIKRQLVETRQITKHVAQILDARFNTERDENDKVIRNVKIITLKSNLVSQFRKEFELYKVREINDYHHAHDAYLNAVVGTALLKKYPKLAPEFVYGEYKKYNVRKLIAKSHRERGKATAKYFFYSNLMNFFKTEVKLADGTVIERPVIETNKETGEIVWNKQKDFEIVRKVLSYPQVNIVKKVEVQTGGFSKESILPKGDSDKLIPRKIYWDPKKYGGFDSPTVAYSVLVVADVEKGKAKKLKTVKELVGITIMERSAFEKNPVAFLEKKGYHNIQEDKIIKLPKYSLFELENGRRRLLASAKELQKGNEMVLPAHLVTLLYHAHRIDKSNGEPEHLEQKQEYVEKHKNEFKELLDYISDFSEKYVLADKNLEKIKALYDQNDDASIEEIASSFINLLTFTALGAPAAFNFFGEKIDRKRYTSTKECLNATLIHQSITGLYETRIDLSKLGED

SEQ ID NO: 163 - protein, 1368 aa, Artificial Sequence
  1368 residue - marginal ancestral sequence reconstruction method - node 102
MNKPYSIGLDIGTNSVGWAVITDDYKVPAKKMKVLGNTDKQSIKKNLLGALLFDSGETAEATRLKRTARRRYTRRKNRLRYLQEIFAEEMNKVDESFFQRLDDSFLVDEDKRGERHPIFGNIAAEVKYHDEFPTIYHLRKHLADTSEKADLRLVYLALAHMIKFRGHFLIEGDLKAENTDVQALFKDFVEVYDKTIEESHLSEITVDALSILTEKVSKSRRLENLIAHYPTEKKNTLFGNLIALSLGLQPNFKTNFQLSEDAKLQFSKDTYEEDLEGLLGEVGDEYADLFASAKNLYDAILLSGILTVDDNSTKAPLSASMVKRYEEHQKDLKKLKDFIKVNAPDQYNAIFKDKNKKGYAGYIESGVKQDEFYKYLKGILLKINGSGDFLDKIDREDFLRKQRTFDNGSIPHQIHLQEMHAILRRQGEHYPFLKENQDKIEKILTFRIPYYVGPLARKGSRFAWAEYKADEKITPWNFDDILDKEKSAEKFITRMTLNDLYLPEEKVLPKHSLLYETFTVYNELTKVKYVNEQGEAKQFFDANMKQEIFDHVFKENRKVTKDKLLNYLNKEFEEFRIVNLTGLDKEFNSSLGTYHDLRKILKDKSFLDDKANEQIIEDIIQTLTLFEDREMIRQRLQKYSDIFTKAQLKKLERRHYTGWGRLSYKLINGIRNKENKKTILDYLIDDGYANRNFMQLINDDALSFKEEIAKAQIIGDVDDIANVVHDLPGSPAIKKGILQSVKIVDELVKVMGNHNPANIIIEMARENQTTDRGRRNSQQRLKLLQDSLKNLDNPVNIKNPVENQQLQNDRLFLYYIQNGKDMYTGETLDINNLSQYDIDHIIPQAFIKDDSLDNRVLTSSAENRGKSDDVPSIEVVRARKSFWMKLLKAGLISQRKFDNLTKAERGGLTEEDKAGFIKRQLVETRQITKHVAQILDARFNTEHDENKKVIRNVKIITLKSNLVSQFRKEFELYKVREINDYHHAHDAYLNAVVGTALLKKYPKLAPEFVYGEYKKYNVRKLIAKSYRERGKATAKYFFYSNLMNFFKKEVKLADGTVIERPDIETNKEDGEIAWNKQKDFKIVRKVLSYPQVNIVKKTEVQTGGFSKESILPKGDSDKLIPRKSYWDPKKYGGFDSPTVAYSVLVVADVEKGKSKKLKTVQELVGITIMERSAFEKNPVAFLEKKGYRNIREDKIIKLPKYSLFELENGRRRLLASAKELQKGNELVIPQRFTTLLYHAHRIDKSNGEPEHLEQKQEYVEKHKDEFKELLDYISDFSEKYVLADKNLEKIKALFAQNDDASIEEIATSFISLLTFTALGAPAAFNFFGEKIDRKRYTSTTECLNATLIHQSITGLYETRIDLSKLGED

SEQ ID NO: 164 - protein, 1368 aa, Artificial Sequence
  1368 residue - marginal ancestral sequence reconstruction method - node 103
MKKSYSIGLDIGTNSVGWAVITDDYKVPAKKMKVLGNTDKKYIKKNLLGALLFDSGETAEATRLKRTARRRYTRRKNRLRYLQEIFAEEMAKVDESFFQRLDESFLTDDDKTFDSHPIFGNKAEEDAYHQKFPTIYHLRKHLADSSEKADLRLVYLALAHMIKFRGHFLIEGELNAENTDVQKLFADFVGVYDRTFDDSHLSEITVDAASILTEKISKSRRLENLIKHYPTEKKNTLFGNLIALALGLQPNFKTNFKLSEDAKLQFSKDTYEEDLEELLGKIGDDYADLFTSAKNLYDAILLSGILTVDDNSTKAPLSASMIKRYVEHHEDLEKLKEFIKVNKSELYHDIFKDKTKNGYAGYIENGVKQDEFYKYLKGILSKINGSDYFLDKIEREDFLRKQRTFDNGSIPHQIHLQEMHAILRRQGDYYPFLKENQDKIEKILTFRIPYYVGPLARKDSRFAWAEYRSDEKITPWNFDEVVDKEKSAEKFITRMTLNDLYLPEEKVLPKHSHVYETFAVYNELTKIKYVNEQGKSSQFFDANMKQEIFDHVFKENRKVTKEKLLNYLNKEFEEFRINDLIGLDKEFNASLGTYHDLKKILKDKSFLDDKTNEEIIEDIILTLTLFEDRDMIHERLQKYSDIFTKQQLKKLERRHYTGWGRLSYKLINGIRNKENNKTILDYLIDDGSANRNFMQLINDDALSFKQIIQEAQVVGDVDDIEAVVHDLPGSPAIKKGILQSVKIVDELVKVMGNDNPDNIVIEMARENQTTNRGRSKSQQRLKRLQDSLKELGSNLNKKKPVENSHLQNDRLFLYYIQNGKDMYTGEELDIDHLSDYDIDHIIPQAFIKDDSIDNRVLTSSAKNRGKSDDVPSIEIVRARKSYWVKLYKSGLISKRKFDNLTKAERGGLTEADKAGFIKRQLVETRQITKHVAQILDARFNTERDENDKVIRDVKVITLKSNLVSQFRKEFKFYKVREINDYHHAHDAYLNAVVGTALLKKYPKLAPEFVYGEYKKYDVRKLIAKSHSEMGKATAKYFFYSNLMNFFKTEVKYADGKVIERPVIETNKDTGEIVWNKQKDFEIVRKVLSYPQVNIVKKVEVQTGGFSKESILPKGDSDKLIPRKVYWDTKKYGGFDSPTVAYSVLVVADVEKGKAKKLKTVKELVGISIMERSFFEENPVAFLEKKGYHNVQEDKLIKLPKYSLFEFEGGRRRLLASATELQKGNEMVLPAHLVELLYHAHRIDNFNGSTEHLEQKQKYVSEHKKEFEEVLSCVENFANLYVDVEKNLSKIRAAADSMDNFSIEEISNSFINLLTLTALGAPADFNFLGEKIPRKRYTSTKECLNATLIHQSITGLYETRIDLSKLGEE

SEQ ID NO: 165 - protein, 1368 aa, Artificial Sequence
  1368 residue - marginal ancestral sequence reconstruction method - node 104
MEKSYSIGLDIGTNSVGWAVITDDYKVPAKKMKVLGNTDKKYIKKNLLGALLFDSGETAEATRLKRTARRRYTRRKNRLRYLQEIFAKEMAKVDESFFQRLEESFLTDDDKTFDSHPIFGNKAEEDAYHQKFPTIYHLRKHLADSPEKADLRLVYLALAHMIKFRGHFLIEGELNAENTDVQKLFADFVGVYDRTFDDSHLSEITVDAASILTEKISKSRRLENLIKQYPTEKKNTLFGNLIALALGLQPNFKTNFKLSEDAKLQFSKDTYEEDLEELLGKIGDDYADLFTSAKNLYDAILLSGILTVDDNSTKAPLSASMIKRYVEHHEDLEKLKEFIKVNKLELYHDIFKDKTKNGYAGYIENGVKQDEFYKYLKSILSKINGSDYFLDKIEREDFLRKQRTFDNGSIPHQIHLQEMHSILRRQGDYYPFLKENQAKIEKILTFRIPYYVGPLARKDSRFAWANYHSDEPITPWNFDEVVDKEKSAEKFITRMTLNDLYLPEEKVLPKHSHVYETFAVYNELTKIKYVNEQGKSFQFFDANMKQEIFDHVFKENRKVTKAKLLSYLNNEFEEFRINDLIGLDKDFNASLGTYHDLKKILKDKSFLDDKTNEQIIEDIVLTLTLFEDRDMIHERLQKYSDIFTSQQLKKLERRHYTGWGRLSYKLINGIRNKENNKTILDFLIDDGHANRNFMQLINDDSLSFKTIIQEAQVVGDVDDIEAVVHDLPGSPAIKKGILQSVKIVDELVKVMGNDNPDNIVIEMARENQTTGYGRNKSNQRLKRLQDSLKEFGSDLSKKKPVENSHLQNDRLFLYYIQNGKDMYTGEELDIDHLSDYDIDHIIPQAFIKDNSIDNRVLTSSAKNRGKSDDVPSIEIVRNRKSYWYKLYKSGLISKRKFDNLTKAERGGLTEADKAGFIKRQLVETRQITKHVAQILDARFNTKRDENDKVIRDVKVITLKSNLVSQFRKEFKFYKVREINDYHHAHDAYLNAVVGTALLKKYPKLAPEFVYGEYKKYDVRKLIAKSHSEMGKATAKYFFYSNLMNFFKTEVKYADGRVFERPDIETNKADGEVVWNKQKDFDIVRKVLSYPQVNIVKKVEVQTGGFSKESILPKGDSDKLIPRKVYWDTKKYGGFDSPTVAYSVLVVADVEKGKAKKLKTVKELVGISIMERSFFEENPVSFLEKKGYHNVQEDKLIKLPKYSLFEFEGGRRRLLASATELQKGNEVVLPAHLVELLYHAHRIDNFNGSTEHLEQKQKYVSEHKKEFEEVLSCVENFANLYVDVEKNLSKIRAAAESMDNFSIEEISASFINLLTLTALGAPADFNFLGEKIPRKRYTSTKECLSATLIHQSVTGLYETRIDLSKLGEE

SEQ ID NO: 166 - protein, 1368 aa, Artificial Sequence
  1368 residue - marginal ancestral sequence reconstruction method - node 105
TKKNYSIGLDIGTNSVGWAVITDDYKVPAKKMKVLGNTDKKYIKKNLLGALLFDSGETAEATRLKRTARRRYTRRKNRLRYLQEIFAEEMAKVDESFFQRLDESFLTDDDKTFDSHPIFGNKAEEDAYHQKFPTIYHLRKHLADSSEKADLRLVYLALAHMIKFRGHFLIEGELNAENTDVQKLFADFVGVYDRTFDDSHLSEITVDAASILTEKISKSRRLENLIKHYPTEKKNTLFGNLIALALGLQPNFKTNFKLSEDAKLQFSKDTYEEDLEELLGKIGDDYADLFTSAKNLYDAILLSGILTVDDNSTKAPLSASMIKRYVEHHEDLEKLKEFIKANKSELYHDIFKDKTKNGYAGYIENGVKQDEFYKYLKGILSKINGSDYFLDKIEREDFLRKQRTFDNGSIPHQIHLQEMHAILRRQGDYYPFLKENQDKIEKILTFRIPYYVGPLARKDSRFAWAEYRSDEKITPWNFDKVIDKEKSAEKFITRMTLNDLYLPEEKVLPKHSHVYETFAVYNELTKIKYVNEQGKDSQFFDSNMKQEIFDHVFKENRKVTKEKLLNYLNKEFPEYRIKDLIGLDKEFNASLGTYHDLKKILKDKSFLDDKVNEEVIEDIIKTLTLFEDRDMIHERLQKYSDIFTKQQLKKLERRHYTGWGRLSYKLINGIRNKENNKTILDYLIDDGSANRNFMQLINDDALSFKQIIQEAQVVGDVDDIEAVVHDLPGSPAIKKGILQSVKIVDELVKVMGNDNPDNIVIEMARENQTTNRGRSQSQQRLKKLQNSLKELGSNLNEEKPVENSHLQNDQLFLYYIQNGKDMYTGDELDIDHLSDYDIDHIIPQAFIKDDSIDNRVLTSSAKNRGKSDDVPSLDIVRARKAEWVRLYKSGLISKRKFDNLTKAERGGLTEADKAGFIKRQLVETRQITKHVAQILDARFNTERDENDKVIRDVKVITLKSNLVSQFRKEFKFYKVREINDYHHAHDAYLNAVVGTALLKKYPKLAPEFVYGEYKKYDVRKLIAKSHSEMGKATAKYFFYSNLMNFFKTVVRYADGKVIERPVIETNKDTGEIAWNKQTDFEKVRKVLSYPQVNIVKKVETQTGGFSKESILPKGDSDKLIPRKVYWDTKKYGGFDSPTVAYSVLVVADVEKGKAKKLKTVKELVGISIMERSFFEENPVEFLENKGYHNVQEDKLIKLPKYSLFEFEGGRRRLLASATELQKGNEMVLPAHLVELLYHAHRIDNFNGSTEHLEQKQKYVSEHKKEFEEVLSCVENFANLYVDVEKNLSKIRAAADSMDNFSIEEISNSFINLLTLTALGAPADFNFLGEKIPRKRYTSTKECLNATLIHQSITGLYETRIDLSKLGEE

SEQ ID NO: 167 - protein, 1368 aa, Artificial Sequence
  1368 residue - marginal ancestral sequence reconstruction method - node 106
TKKNYSIGLDIGTNSVGWAVITDDYKVPAKKMKVLGNTDKKYIKKNLLGALLFDSGETAEATRLKRTARRRYTRRKNRLRYLQEIFAEEMAKVDESFFQRLDESFLTDDDKTFDSHPIFGNKAEEDAYHQKFPTIYHLRKHLADSSEKADLRLVYLALAHMIKFRGHFLIEGELNAENTDVQKIFADFVGVYDRTFDDSHLSEITVDAASILTEKISKSRRLENLIKYYPTEKKNTLFGNLIALALGLQPNFKTNFKLSEDAKLQFSKDTYEEDLEELLGKIGDDYADLFTSAKNLYDAILLSGILTVDDNSTKAPLSASMIKRYVEHHEDLEKLKEFIKANKSELYHDIFKDKTKNGYAGYIENGVKQDEFYKYLKNILSKIDGSDYFLDKIEREDFLRKQRTFDNGSIPHQIHLQEMHAILRRQGDYYPFLKENQDRIEKILTFRIPYYVGPLARKDSRFAWAEYRSDEKITPWNFDKVIDKEKSAEKFITRMTLNDLYLPEEKVLPKHSHVYETYAVYNELTKIKYVNEQGKDSQFFDSNMKQEIFDHVFKENRKVTKEKLLNYLNKEFPEYRIKDLIGLDKEFNASLGTYHDLKKILKDKAFLDDKVNEEVIEDIIKTLTLFEDKDMIHERLQKYSDIFTANQLKKLERRHYTGWGRLSYKLINGIRNKENNKTILDYLIDDGSANRNFMQLINDDTLPFKQIIQKSQVVGDVDDIEAVVHDLPGSPAIKKGILQSVKIVDELVKVMGNDNPDNIVIEMARENQTTNRGRSQSQQRLKKLQNSLKELGSNLNEEKPVENSHLQNDQLFLYYIQNGKDMYTGDELDIDHLSDYDIDHIIPQAFIKDDSIDNRVLTSSAKNRGKSDDVPSLDIVRARKAEWVRLYKSGLISKRKFDNLTKAERGGLTEADKAGFIKRQLVETRQITKHVAQILDARFNTERDENDKVIRDVKVITLKSNLVSQFRKDFEFYKVREINDYHHAHDAYLNAVVGTALLKKYPKLASEFVYGEYKKYDVRKLIAKSHSEMGKATAKYFFYSNLMNFFKTVVRYADGKVIERPVIETNKDTGEIAWNKQTDFEKVRKVLSYPQVNIVKKVETQTGGFSKESILPKGDSDKLIPRKVYWDTKKYGGFDSPTVAYSVFVVADVEKGKAKKLKTVKELVGISIMERSFFEENPVEFLENKGYHNIREDKLIKLPKYSLFEFEGGRRRLLASASELQKGNEMVLPGHLVELLYHAHRIDNFNGSTEYLEQKQNYVSEHKKEFEKVLSCVEDFANLYVDVEKNLSKIRAVADSMDNFSIEEISNSFINLLTLTALGAPADFNFLGEKIPRKRYTSTKECLNATLIHQSITGLYETRIDLSKLGEE

SEQ ID NO: 168 - protein, 1368 aa, Artificial Sequence
  1368 residue - marginal ancestral sequence reconstruction method - node 107
MKKPYSIGLDIGTNSVGWAVITDDYKVPAKKMKVLGNTDKQYIKKNLLGALLFDSGNTAEDRRLKRTARRRYTRRRNRILYLQEIFSEEMNKVDDSFFHRLDDSFLVPEDKRGDRHPIFGNLAEEVAYHEQFPTIYHLRKHLADSTEKADLRLVYLALAHMIKFRGHFLIEGDLNAENTDVQKLFQDFVEVYDRTFEDSHLSEQNVDVEEILTEKISKSRRLERLLKHFPNEKKNGLFGNFIALILGLQPNFKTNFDLSEDAKLQFSKDTYEEDLENLLGQIGDEYADLFLAAKKLYDAILLSGILTVTDSSTKAPLSASMIQRYEEHQKDLAQLKQFIKQNLPDKYNEVFSDKSKDGYAGYIEGKTSQEDFYKYLKNLLSKIEGSEYFLDKIDREDFLRKQRTFDNGSIPHQIHLQEMHAILRRQGEYYPFLKENQEKIEKILTFRIPYYVGPLARGNSDFAWLTRKSDEKITPWNFDEVVDKESSAEAFINRMTNYDLYLPDEKVLPKHSLLYEKFTVYNELTKVKYVTEQGKTYQFFDANMKQEIFDHLFKENRKVTKKKLLDYLEKEFDEFRIVDLTGLDKEFNASLGTYHDLLKILKDKDFLDDEENEEILEDIVLTLTLFEDREMIRKRLEKYSDLFTKEQLKKLERRHYTGWGRLSAKLINGIRDKQSGKTILDYLIDDGSSNRNFMQLINDDALSFKEEIQKAQVIGETDNLKQVVQDLAGSPAIKKGILQSLKIVDELVKVMGGHNPENIVVEMARENQTTNQGRRNSQQRLKRLEDALKNLGSNILKEHPVDNQQLQNDRLFLYYLQNGKDMYTGEELDIDNLSQYDIDHIIPQAFIKDDSIDNRVLTSSAENRGKSDNVPSIEVVRKMKSFWQKLLNAKLISQRKFDNLTKAERGGLTEDDKAGFIKRQLVETRQITKHVARILDARFNTELDENNKRIRNVKIITLKSNLVSQFRKEFELYKVREINDYHHAHDAYLNAVVATALLKKYPQLEPEFVYGDYPKYNSRKLIAKSYRERKKATAKMFFYSNIMNFFKTEVKLADGTVIERPVIEVNKETGEIVWDKEKDFATVRKVLSYPQVNIVKKVEEQTGGFSKESILPKGNSDKLIPRKIYWDPKKYGGFDSPTVAYSVLVVADIEKGKAKKLKTVKELVGITIMERSAFEKNPVAFLEKKGYQNIQEDNIIKLPKYSLFELENGRRRLLASAKELQKGNEMVLPAHLVTLLYHAKRIHKVNGEPEHLEQKQEYVEKHKNEFKELLDYISDFSEKYILADNNLEKIKELYDQNDDADINELASSFINLLTFTALGAPAAFKFFGKNIDRKRYTSTTEILNATLIHQSITGLYETRIDLSKLGED

SEQ ID NO: 169 - protein, 1368 aa, Artificial Sequence
  1368 residue - marginal ancestral sequence reconstruction method - node 108
MKKPYSIGLDIGTNSVGWAVITDDYKVPAKKMKVLGNTDKQYIKKNLLGALLFDSGNTAEDRRLKRTARRRYTRRRNRILYLQEIFSEEMNKVDDSFFHRLDDSFLVPEDKRGDRHPIFGNLAEEVAYHEQFPTIYHLRKHLADSTEKADLRLVYLALAHMIKFRGHFLIEGDLNAENTDVQKLFQEFVEVYDRTFEDSHLSEQNVDVEEILTEKISKSRRLERLLKHFPNEKKNGLFGNFLALILGLQPNFKTNFDLSEDAKLQFSKDTYEEDLENLLGQIGDEYADLFLAAKKLYDSILLSGILTVTDLSTKAPLSASMIQRYDEHQKDLAQLKQFIKQNLPDKYNEVFSDASKDGYAGYIEGKTNQEDFYKYLKNLLSKIEGSEYFLDKIDREDFLRKQRTFDNGSIPHQIHLQEMRAILRRQGEYYPFLKENQEKIEKILTFRIPYYVGPLARGNSDFAWLSRKSDEKITPWNFDEVVDKESSAEAFINRMTNYDLYLPDEKVLPKHSLLYEKFTVYNELTKVKYVTEQGKTYQFFDANMKQEIFDGLFKENRKVTKKKLLDFLEKEFDEFRIVDLTGLDKEFNASLGTYHDLLKILKDKDFLDDSENEEILEDIVLTLTLFEDREMIRKRLEKYSDLFTKEQLKKLERRHYTGWGRLSAKLINGIRDKQSRKTILDYLIDDGSSNRNFMQLINDDALSFKEEIAKAQVIGETDNLKQVVQDLAGSPAIKKGILQSLKIVDELVKVMGGHEPENIVVEMARENQTTNQGRRNSQQRLKRLEDAIKNLGSNILKEHPVDNQQLQNDRLFLYYLQNGRDMYTGEELDIDNLSQYDIDHIIPQAFIKDNSIDNRVLTSSAENRGKSDNVPSIDVVRKMKSFWSKLLNAKLISQRKFDNLTKAERGGLTDDDKAGFIKRQLVETRQITKHVARILDERFNTELDENNKRIRKVKIVTLKSNLVSNFRKEFELYKVREINDYHHAHDAYLNAVVAKALLKKYPQLEPEFVYGDYPKYNSRKLIAKSYRERKKATAKMFFYSNIMNFFKTEVKLADGTVIERPVIEVNKETGEIVWDKEKHFATVRKVLSYPQVNIVKKVEEQTGGFSKESILPKGNSDKLIPRKIYWDPKKYGGFDSPTVAYSVLVVADIEKGKAKKLKTVKELVGITIMERSAFEKNPVAFLERKGYQNIQEDNIIKLPKYSLFELENGRRRLLASAKELQKGNEMVLPAHLVTLLYHAKRIHKVNGEPEHLEQKQEYVEKHKNEFKELLDYISDFSEKYILADKNLEKIKELYDQNDDADINELASSFINLLTFTALGAPAAFKFFDKNIDRKRYTSTTEILNATLIHQSITGLYETRIDLSKLGED

SEQ ID NO: 170 - protein, 1368 aa, Artificial Sequence
  1368 residue - marginal ancestral sequence reconstruction method - node 109
MKKPYSIGLDIGTNSVGWAVVTDDYKVPAKKMKVLGNTDKSHIKKNLLGALLFDSGNTAEDRRLKRTARRRYTRRRNRILYLQEIFSEEMGKVDDSFFHRLDDSFLVTEDKRGDRHPIFGNLAEEVAYHEKFPTIYHLRKHLADSTEKADLRLVYLALAHMIKFRGHFLIEGELNAENTDVQKLFQDFVGVYDRTFEDSHLSEQNVDVEEILTEKISKSRRLERLLKHFPNEKKNGLFGNFIALILGLQPNFKTNFELSEDAKLQFSKDTYEEELEVLLAQIGDNYAELFLSAKKLYDSILLSGILTVTDVSTKAPLSASMIQRYNEHQMDLAQLKQFIRQKLSDKYNEVFSDVSKDGYAGYIDGKTNQEAFYKYLKGLLNKIEGSGYFLDKIEREDFLRKQRTFDNGSIPHQIHLQEMRAIIRRQAEFYPFLADNQDRIEKILTFRIPYYVGPLARGKSDFAWLSRKSADKITPWNFDEIVDKESSAEAFINRMTNYDLYLPNQKVLPKHSLLYEKFTVYNELTKVKYKTEQGKTAQFFDANMKQEIFDGVFKVYRKVTKDKLMDFLEKEFDEFRIVDLTGLDKEFNASYGTYHDLRKILKDKDFLDNSKNEKILEDIVLTLTLFEDREMIRKRLENYSDLLTKEQLKKLERRHYTGWGRLSAELIHGIRNKESRKTILDYLIDDGNSNRNFMQLINDDALSFKEEIAKAQVIGETDNLNQVVSDIAGSPAIKKGILQSLKIVDELVKIMGGHQPENIVVEMARENQFTNQGRRNSQQRLKGLTDSIKEFGSQILKEHPVENSQLQNDRLFLYYLQNGRDMYTGEELDIDYLSQYDIDHIIPQAFIKDNSIDNRVLTSSKENRGKSDDVPSKDVVRKMKSYWSKLLSAKLITQRKFDNLTKAERGGLTDDDKAGFIKRQLVETRQITKHVARILDERFNTETDENNKKIRQVKIVTLKSNLVSNFRKEFELYKVREINDYHHAHDAYLNAVIGKALLGVYPQLEPEFVYGDYPHFHSRKLIAKSGHKENKATAKKFFYSNIMNFFKKDDVRTDGTVIERPVIEVNKKNGEIIWKKDEHISNIKKVLSYPQVNIVKKVEEQTGGFSKESILPKGNSDKLIPRKFYWDTKKYGGFDSPIVAYSILVIADIEKGKSKKLKTVKDLVGITIMERTTFEKNPVAFLERKGYRNVQEENIIKLPKYSLFELENGRRRLLASARELQKGNEIVLPNHLGTLLYHAKNIHKVDGEPKHLEQKQDYVEKHKDEFKELLDVVSNFSKKYILAESNLEKIKELYAQNNNEDIKELASSFINLLTFTAIGAPAAFKFFDKNIDRKRYTSTTEILNATLIHQSITGLYETRIDLSKLGGD

SEQ ID NO: 171 - protein, 1368 aa, Artificial Sequence
  1368 residue - marginal ancestral sequence reconstruction method - node 110
MKKPYSIGLDIGTNSVGWAVITDDYKVPAKKMKVLGNTDKEYIKKNLLGALLFDSGNTAEDRRLKRTARRRYTRRRNRILYLQEIFSEEMNKVDDSFFHRLDDSFLVAEDKRGDRHPIFGNLAEEVKYHEQFPTIYHLRKHLADSSEKADLRLVYLALAHMIKFRGHFLIEDDLDVRNTDVQKLFQEFLEVYDTTFEDSHLSEQNIDVEEILTEKISKSRKLERLLAQFPNQKKNGLFGNFLALIVGLQPNFKTNFDLSEDAKLQFSKDSYDEDLENLLGQIGDEYADLFVAAKKLYDSILLSGILTVTDLSTKAPLSASMIQRYDEHQKDLAQLKQFIKANLPDKYKEVFSDASKDGYAGYIEGKTNQEDFYKYLKNLLSKIEGSEYFLEKIDREDFLRKQRTFDNGSIPHQVHLAEMKAILRRQGEYYPFLKENQEKIEKILTFRIPYYVGPLARGNSDFAWLSRKSDEKITPWNFDEVVDKESSAEAFINRMTNNDLYLPDEKVLPKHSLLYEKFTVYNELTKVKYVTEQGETYQFFDANMKQEIFDGLFKENRKVTKKKLLDFLEKEFDEFRIVDITGLDKEFNASLGTYHDLLKILKDKDFLDDSENEDILEDIVLTLTLFEDREMIKKRLEKYSDLFTKKQLKKLERRHYTGWGRLSAKLINGIRDKQSRKTILDYLIDDGRSNRNFMQLINDDALSFKEEIAKAQVIGDSDNLKQVVQDLAGSPAIKKGILQSLKIVDELVKVMGGYEPEQIVVEMARENQTTNQGRRNSQQRLKRLEEAIKNLGSDILKEHPVDNQQLQNDRLFLYYLQNGRDMYTGETLDIDNLSQYDIDHIIPQAFIKDNSIDNRVLVSSAKNRGKSDNVPSIDVVKKMKSFWSKLLNAKLISQRKFDNLTKAERGGLTDDDKAGFIKRQLVETRQITKHVARILDERFNTELDENNKRIRKVKIVTLKSNLVSNFRKEFEFYKVREINDYHHAHDAYLNAVVAKALLTKYPQLEPEFVYGDYPKYNSRKLIAKSYRERKSATEKMFFYSNIMNFFKTKVKLADGTVIERPVIEVNNETGEIVWDKEKHFATVRKVLSYPQVNIVKKVEEQTGGFSKESILPKGNSDKLIPRKIYLDPKKYGGFDSPTVAYSVLVVADIEKGKAKKLKTVKELVGITIMERSRFEKNPVAFLERKGYQNIQEDKIIKLPKYSLFELENGRRRLLASAKELQKGNEMVLPAHLVKLLYHAKRINKVNGEPEHIEQKQEYVEKHRNEFKDLLNYISDFSEKYILADKNLEKIKELYEQNEDDSVNELASSFINLLTFTALGAPAAFKFFDKNIDRKRYTSTTEVLNATLIHQSITGLYETRIDLSKLGED

SEQ ID NO: 172 - protein, 1368 aa, Artificial Sequence
  1368 residue - marginal ancestral sequence reconstruction method - node 111
MKKPYSIGLDIGTNSVGWAVITDDYKVPAKKMKVLGNTDKEYIKKNLLGALLFDSGNTAEDRRLKRTARRRYTRRRNRILYLQEIFSEEMNKVDESFFHRLDDSFLVAEDKRGDRHPIFGNIADEVKYHEQFPTIYHLRKHLADSSEKADLRLVYLALAHMIKFRGHFLIDDPLDVRNTDSQKLFQEFLEAYDSTQEDSHLSEQKIDISDIITEKISKSRKVEALLAQFPNQKKNSFFGNLVSLVFGLMPNFKTNFDLSEDAKLQFSKDSYDEDLENLLGQIGDEYADVFVAAKKLYDSILLSGILTVNDLSTKAPLSASMIQRYDEHNKDLAQLKDFIRANLPDVFKEVFSDASKNGYAGYIEGKTSQEDFYKYLKNLLGKVDGSEYFIEKIDREDFLRKQRTFDNGSIPHQVHLAEMKAILRRQGEYYPFLKENAEKIQQILTFRIPYYVGPLARGNSDFAWASFNSDEKITPWNFDEVIDKNSSAQAFIERMTNNDLYLPDEKVLPKHSLLYEKFTVYNELTKVKYVTETGEAREFFDANLKQEIFDGLFKKNRKVTKKKLLDFLEKNFDEFRIVDITGLDKEFNASYGTYHDLLKILKDKEFMDDSENEDILEDIVLTLTLFEDREMIKQRLAKYADLFDKKVIDKLARRHYTGWGRLSAKLINGIRDKQSRKTILDYLIDDGRSNRNFMQLINDDNLSFKDEIAKAQVIGDSDDLHQVVQDLAGSPAIKKGILQSLKIVDELVKVMGGYEPEQIVVEMARENQTTARGRRNSQQRLKRLEEAIKNLGSDILKEHPVDNQQLQNDRLFLYYLQNGRDMYTGETLDIDNLSQYDIDHIIPQAFIKDNSIDNRVLVSSAKNRGKSDNVPSEDVVKRMKSFWSKLLNAKLISQRKFDNLTKAERGGLTDDDKAGFIKRQLVETRQITKHVARILDERFNREFDENNKRIRKVKIVTLKSNLVSNFRKEFEFYKVREINDYHHAHDAYLNAVVAKALLTKYPKLEPEFVYGEYPKYNSRKLIAKSYRERKSATEKMFFYSNIMNMFKTKVKLADGRVIERPMIEVNEETGEIAWDKTKHFATVKKVLSYPQVNIVKKVEEQTGGFSKESILPKGNSDKLIARKNYLDTQKYGGFDSPTVAYSVLVVADIEKGKAKKLKTVKELIGITIMERSRFENNSVAFLERKGYQNIQENKIIKLPKYSLFELENGRRRLLASAKELQKGNEMVLPAHLVKLLYHAKHINSVNGEPEHIEQKQNYVEKHRNEFKDLLNYIRDFSEKYILADKNLEKINELFEENEEDSVSELASSFINLLTFTALGAPAAFKFFDKNIDRKRYTSTTEVLSATLIHQSITGLYETRIDLSKLGED

SEQ ID NO: 173 - protein, 1368 aa, Artificial Sequence
  1368 residue - marginal ancestral sequence reconstruction method - node 112
MKKPYSIGLDIGTNSVGWAVITDDYKVPAKKMKVLGNTDKEYIKKNLLGALLFDSGETAEATRMKRTARRRYTRRRNRILYLQEIFSEEMNKVDESFFHRLDDSFLVAEDKRGERHPIFGNIADEVKYHEEFPTIYHLRKHLADSSEKADLRLVYLALAHIIKYRGHFLIDEPIDIRNTDSQKLFQEFLDAYDSIQEDSHLSEEKTDISDIITAKISKSRKVEALLAQFPNQKKNSFFGNLVSLVFGLMPNFKSNFDLSEDAKLQFSKDSYDEDLENLLGMIGDEYADVFVAAKKLYDSILLSGILTTNDLSTKAPLSASMIERYDEHNKDKQLLKDFIRANIGDVFKEVFYDTSKNGYAGYIEGKTSQEDFYKYLKNLLGKVDGSEYFIEKIDREDFLRKQRTFDNGSIPHQVHLAEMKAILRRQGEFYPFLKENAEKIQQILTFRIPYYVGPLARGNSRFAWASFNSNEKITPWNFDDVIDKSSSAQAFIERMTNNDLYLPDEKVLPKHSLLYEKFTVYNELTKVKYVTETGEAREFFDANLKKEIFDGLFKKNRKVTKKKLLDFLEKNFDEFRIVDITGLDNEFNASYGTYHDLLKILKDKEFMDDSENEDILEDIVLTLTLFEDREMIKQRLLKYEDLFDKKVIDKLSRRHYTGWGRLSAKLINGIKDKQSRKTILDYLIDDGHSNRNFMQLINDDNLSFKDEIAKAQVIGDGDDLHQVVQELAGSPAIKKGILQSLKIVDELVKVMGGYDPEQIVVEMARENQTTARGRRNSQQRLGRLKEAIQDLGSDILKEHPVENNQLQNDRLYLYYLQNGRDMYTGETLDIDNLSQYDIDHIIPQAFIKDNSLDNRVLVSSAKNRGKSDNVPSNDVVKRMKSFWSKLLNAKLISQRKFDNLTKAERGGLSADDKAGFIKRQLVETRQITKHVARILDERFNREFDENNKRIRKVKIVTLKSNLVSNFRKEFEFYKVREINNYHHAHDAYLNAVVAKALLTRYPKLEPEFVYGEYPKYNSRKLIAKSYRERKSATEKMFFYSNIMNMFKTTIKLADGRVVERPMIEANEETGEIAWDKTKHFATVKKVLSYPQVNIVKKVEEQTGGFSKESILPKGNSDKLIARKNYLNTQKYGGFDSPTVAYSVLFVADIEKGKSKKLKTVKEMIGITIMERSRFESNSVAFLEEKGYQNIRENTIIKLPKYSLFELENGRRRLLASAKELQKGNEMVLPQHLVKLLYHAKHINSLNGKPEHIEKKRNYVEKHRNEFTDLLHHIKDFSEKNILAAKNLEKINEAFEENEEDSVSELAQSFISLLTFTALGAPAAFKFFDKNIDRKRYTSTTEVLSATLIHQSITGLYETRIDLSKLGEE

SEQ ID NO: 174 - protein, 1368 aa, Artificial Sequence
  1368 residue - marginal ancestral sequence reconstruction method - node 113
MKKPYSIGLDIGTNSVGWAVITDDYKVPSKKMKVLGNTDKRYIKKNLLGALLFDSGNTAEDRRLKRTARRRYTRRRNRILYLQEIFSEEMNKVDDSFFHRLDDSFLVPEDKRGSKHPIFGNLAEEKAYHKQFPTIYHLRKHLADSTEKADLRLVYLALAHMIKYRGHFLIEGDLNSENNDVQKLFNDFVEVYDKTFEGSHLSEQNADVEEILTEKISKSRRLERILKHFPNEKKNGLFGNFLALILGLQPNFKTNFDLAEDAKLQFSKDTYEEDLENLLGQIGDDYADLFLAAKKLYDAILLSGILTVTDSSTKAPLSASMIKRYEEHQKDLALLKQFIKQNLPDKYNEVFSDKSKDGYAGYIEGKTTQEDFYKYIKNLLSKIEGSDYFLDKIDREDFLRKQRTFDNGSIPHQIHLQEMHAILRRQGEYYPFLKENQEKIEKILTFRIPYYVGPLARGNSDFAWLTRKSDEKITPWNFDEVVDKESSAEAFINRMTNYDLYLPDEKVLPKHSLLYETFAVYNELTKVKFIAEGMRDYQFLDSGQKKEIVNQLFKEKRKVTEKDIIDYLENEIDEYDGVELKGLEKQFNASLSTYHDLLKILKDKEFLDDEENEEILEDIVLTLTLFEDREMIRKRLEKYSDIFTKEQLKKLERRHYTGWGRLSAKLINGIRDKQSGKTILDYLIDDGTSNRNFMQLINDDALSFKEEIQKAQVIGETDDLKQVVQDLAGSPAIKKGILQSLKIVDELVKVMGGHNPENIVVEMARENQTTNQGRRNSQQRYKRLEDALKNLGSNILKEHPTDNQQLQNDRLFLYYLQNGKDMYTGEELDIDQLSQYDIDHIIPQAFIKDDSIDNRVLTSSAENRGKSDNVPSIEVVRKRKSFWQQLLDSKLISQRKFDNLTKAERGGLTEEDKAGFIKRQLVETRQITKHVARILDARFNTELDENNKRIRNVKIITLKSNLVSQFRKEFELYKVREINDYHHAHDAYLNAVVATALLKKYPQLEPEFVYGDYPKYNSRKLIAKSYRERKKATEKVFFYSNIMNFFKKEVKYADGTVIERPVIEVNKETGEIVWDKEKDFATVRKVLSYPQVNIVKKVEEQTGGFSKESILPKGNSDKLIPRKIYLDPKKYGGFDSPTIAYSVLVIADIEKGKAKKLKTVKELVGITIMERTAFEKNPIAFLEKKGYKNIQEDNIIKLPKYSLFELENGRRRLLASAKELQKGNEMVLPAHLVTLLYHAKRIHKINGEPIHLEQKQEYVEKHKNEFKELLNYISDFSEKYILADNNLEKIKELYDQNDDADINELASSFINLLTFTALGAPAAFKFLGKNIDRKRYTSTTEILNATLIHQSITGLYETRIDLSKLGED

SEQ ID NO: 175 - protein, 1368 aa, Artificial Sequence
  1368 residue - marginal ancestral sequence reconstruction method - node 114
MKKPYSIGLDIGTNSVGWAVITDDYKVPSKKMKVLGNTDKRYIKKNLLGALLFDSGTTAEDRRLKRTARRRYTRRRNRILYLQEIFSEEMSKVDDSFFHRLDDSFLVPEDKRGSKYPIFGNLAEEKAYHKQFPTIYHLRKHLADSTEKADLRLVYLALAHMIKYRGHFLIEGDFNSKNNDIQKIFNDFVEIYDNTFEGSHLSEQNAQVEEILTDKISKSAKRERILKLFPNEKNNGLFSEFLKLIVGNQADFKKHFDLEEKAPLQFSKDTYDEDLENLLGQIGDDYADLFLAAKKLYDAILLSGILTVTDSSTKAPLSASMIKRYEEHQKDLALLKQFIKNNLPEKYNEVFSDKSKDGYAGYIDGKTTQEDFYKYIKNLLSKFEGADYFLDKIDREDFLRKQRTFDNGSIPHQIHLQEMHAILRRQGEYYPFLKENKEKIEKILTFRIPYYVGPLARGNSDFAWLTRKSDEKITPWNFEEVVDKESSAEAFINRMTNYDLYLPEEKVLPKHSLLYETFAVYNELTKVKFIAEGMRDYQFLDSGQKKEIVNQLFKEKRKVTEKDIIDYLHNEVDGYDGIELKGIEKQFNASLSTYHDLLKIIKDKEFLDDAENEAILEDIVHTLTIFEDREMIKQRLAKYDNLFDEKVLKKLTRRHYTGWGKLSAKLINGIRDKQTGNTILDYLIDDGTSNRNFMQLINDDALSFKEEIQKAQVIGETDDVKQVVQDLPGSPAIKKGILQSIKIVDELVKVMGGHNPESIVVEMARENQTTNQGKRNSQQRYKRLEDALKNLGSNILKENPTDNNQLQNDRLFLYYLQNGKDMYTGEELDIDQLSSYDIDHIIPQAFIKDDSIDNRVLTSSADNRGKSDNVPSIEVVRKRKSFWQQLLDSKLISQRKFDNLTKAERGGLTEEDKAGFIKRQLVETRQITKHVARILDARFNTELDENDKKIRTVKIITLKSNLVSQFRKEFELYKVREINDYHHAHDAYLNAVVATALLKKYPKLEPEFVYGDYPKYNSKRYISRSYRERKKATEKVFFYSNIMNFFKKEVSYADGTVIERPVIEVNKETGEIVWNKEKDFATVRKVLSYPQVNIVKKVEEQTGGFSKESILPKGNSDKLIPRKIYLDPKKYGGFDSPTIAYSVLVIADIEKGKAKKLKTVKELVGITIMERTAFEKNPITFLEEKGYKNIQEENIIKLPKYSLFELENGRRRLLASAKELQKGNEIVLPAHLVTLLYHAKRIHKINGEPIHLEQKQEYVEKHKNEFKELLNYISEFSEKYILADNNLEKIKSLYDQNEDADIDELASSFINLLTFTALGAPAAFKFLGVNIDRKRYTSTSEILNATLIHQSITGLYETRIDLSKLGED

SEQ ID NO: 176 - protein, 1368 aa, Artificial Sequence
  1368 residue - marginal ancestral sequence reconstruction method - node 115
MTKPYSIGLDIGTNSVGWAVITDDYKVPSKKMKVLGNTSKKYIKKNLLGALLFDSGITAEGRRLKRTARRRYTRRRNRILYLQEIFSTEMATLDDAFFQRLDDSFLVPDDKRDSKYPIFGNLVEEKAYHDEFPTIYHLRKYLADSTKKADLRLVYLALAHMIKYRGHFLIEGEFNSKNNDIQKNFQDFLDTYNAIFESDLSLENSKQLEEIVKDKISKSAKKDRILKLFPGEKNSGIFSEFLKLIVGNQADFKKYFNLDEKAPLHFSKESYDEDLETLLGYIGDDYSDVFLKAKKLYDAILLSGILTVTDNGTEAPLSSAMIMRYKEHEEDLALLKAYIRNISLETYNEVFKDNSKNGYAGYIDGKTSQEDFYVYLKNLLSNFEGADYFLEKIDREDFLRKQRTFDNGSIPYQIHLQEMRAILDKQAKFYPFLAKNKERIEKILTFRIPYYVGPLARGNSDFAWSIRKRNEKITPWNFEDVIDKESSAEAFINRMTSFDLYLPEEKVLPKHSLLYETFNVYNELTKVRFIAESMRDYQFLDSKQKKDIVRLYFKDKRKVTDKDIIEYLHAEIDGYDGIELKGIEKQFNSSLSTYHDLLNIINDKEFLDDSSNEAIIEEIIHTLTIFEDREMIKQRLSKFENIFDKSVLKKLSRRHYTGWGKLSAKLINGIRDEKSGNTILDYLIDDGISNRNFMQLIHDDALSFKKKIQKAQIIGDKDNIKQVVQALPGSPAIKKGILQSIKIVDELVKVMGGRKPESIVVEMARENQYTNQGKSNSQQRLKRLEESLKELGSKILKENIIDNNALQNDRLYLYYLQNGKDMYTGEELDIDRLSNYDIDHIIPQAFLKDNSIDNKVLVSSASNRGKSDDVPSLEVVKKRKTLWYQLLKSKLISQRKFDNLTKAERGGLSREDKAGFIQRQLVETRQITKHVARLLDERFNNKKDENNKTVRTVKIITLKSSLVSQFRKDFELYKVREINDFHHAHDAYLNAVVASALLKKYPKLEPEFVYGDYPKYNSKRYISKSFRERKSATEKVYFYSNIMNIFKKSISLADGTVIERPLIEVNEETGESVWNKESDLATVRKVLSYPQVNIVKKVEEQNHGLDRKGLFNANLSSKPKPNSEYLDPKKYGGYAGISNSFAVLVKGTIEKGAKKKITNVLEFQGISILDRITYRKDKLNFLLEKGYKDIEEELIIELPKYSLFELSDGSRRMLASIGEIHKGNQIFLSQKFVKLLYHAKRISNTIGNENHREQKQKYVENHKKEFEELFYYILEFNENYVGAKKNGELLKSAFQSWQNHSIDELCSSFIGLFELTSRGSAADFEFLGVKIPRYRYTPSSLLKDATLIHQSVTGLYETRIDLAKLGED

SEQ ID NO: 177 - protein, 1368 aa, Artificial Sequence
  1368 residue - marginal ancestral sequence reconstruction method - node 116
MKKPYSIGLDIGTNSVGWAVITDDYKVPSKKMKVLGNTDKRFIKKNLIGALLFDEGTTAEDRRLKRTARRRYTRRKNRLRYLQEIFSEEMSKVDSSFFHRLDDSFLVPEDKRGSKYPIFATLAEEKEYHKQFPTIYHLRKHLADSKEKTDLRLIYLALAHMIKYRGHFLYEEAFDIKNNDIQKIFNEFISIYDNTFEGSSLSGQNAQVEAIFTDKISKSAKRERVLKLFPDEKSTGLFSEFLKLIVGNQADFKKHFDLEEKAPLQFSKDTYDEDLENLLGQIGDDFADLFLAAKKLYDAILLSGILTVTDPSTKAPLSASMIERYENHQKDLAALKQFIKNNLPEKYDEVFSDQSKDGYAGYIDGKTTQEAFYKYIKNLLSKFEGADYFLDKIEREDFLRKQRTFDNGSIPHQIHLQEMNAILRRQGEYYPFLKENKEKIEKILTFRIPYYVGPLARGNRDFAWLTRNSDEAIRPWNFEEIVDKASSAEDFINKMTNYDLYLPEEKVLPKHSLLYETFAVYNELTKVKFIAEGLRDYQFLDSGQKKQIVNQLFKEKRKVTEKDIIHYLHNEVDGYDGIELKGIEKQFNASLSTYHDLLKIIKDKEFMDDAKNEAILENIVHTLTIFEDREMIKQRLAQYDSLFDEKVIKALTRRHYTGWGKLSAKLINGIRDKQTGNTILDYLIDDGNSNRNFMQLINDDGLSFKEIIQKAQVIGKTDDVKQVVQELPGSPAIKKGILQSIKIVDELVKVMGGHNPESIVIEMARENQTTARGKKNSQQRYKRIEDSLKNLASGILKENPTDNNQLQNDRLFLYYLQNGKDMYTGEALDINQLSSYDIDHIIPQAFIKDDSLDNRVLTSSKDNRGKSDNVPSIEVVQKRKAFWQQLLDSKLISERKFNNLTKAERGGLDERDKVGFIKRQLVETRQITKHVAQILDARFNTEVNEKDKKNRTVKIITLKSNLVSNFRKEFRLYKVREINDYHHAHDAYLNAVVAKAILKKYPKLEPEFVYGDYQKYDLKRYISRSPKEVEKATEKYFFYSNLLNFFKEEVHYADGTIVKRENIEYSKDTGEIAWNKEKDFATIKKVLSLPQVNIVKKTEEQTGGFSKESILPKGNSDKLIPRKISLDPKKYGGFDSPTIAYSVLVIADIEKGKAKKLKTVKELVGITIMEKAAFEENPITFLEEKGYKNIRKENIIKLPKYSLFELENGRRRLLASAKELQKGNEIVLPVHLTTLLYHAKRIHKINGEPIHLEQKQEYVEKHRNEFKELLNLISEFSQKYILADNNLEKIKSLYDQNEDADIDQLANSFINLLTFTALGAPAAFKFLGVDIDRKRYTSVSEILNATLIHQSITGLYETRIDLSKLGED

SEQ ID NO: 178 - protein, 1368 aa, Artificial Sequence
  1368 residue - marginal ancestral sequence reconstruction method - node 117
MKKPYSIGLDIGTNSVGWAVITDDYKVPSKKMKVLGNTDKHFIKKNLIGALLFDEGTTAEDRRLKRTARRRYTRRKNRLRYLQEIFSEEMSKVDSSFFHRLDDSFLVPEDKRGSKYPIFATLAEEKEYHKKFPTIYHLRKHLADSKEKTDLRLIYLALAHMIKYRGHFLYEESFDIKNNDIQKIFNEFISIYDNTFEGSSLSGQNAQVEAIFTDKISKSAKRERVLKLFSDEKSTGLFSEFLKLIVGNQADFKKHFDLEEKAPLQFSKDTYDEDLENLLGQIGDDFADLFLVAKKLYDAILLSGILTVTDPSTKAPLSASMIERYENHQKDLAALKQFIKNNLPEKYDEVFSDQSKDGYAGYIDGKTTQEAFYKYIKNLLSKFEGADYFLDKIEREDFLRKQRTFDNGSIPHQIHLQEMNAILRRQGEHYPFLKENKEKIEKILTFRIPYYVGPLARGNRDFAWLTRNSDQAIRPWNFEEIVDKASSAEDFINKMTNYDLYLPEEKVLPKHSLLYETFAVYNELTKVKFIAEGLRDYQFLDSGQKKQIVNQLFKEKRKVTEKDIIHYLHNEVDGYDGIELKGIEKQFNASLSTYHDLLKIIKDKEFMDDAKNEAILENIIHTLTIFEDREMIKQRLAQYDSLFDEKVIKALTRRHYTGWGKLSAKLINGIRDKQTGNTILDYLIDDGDSNRNFMQLINDDGLSFKEIIQKAQVVGKTDDVKQVVQELPGSPAIKKGILQSIKIVDELVKVMGGHNPESIVIEMARENQTTARGKKNSQQRYKRIEDALKNLAPGILKENPTDNIQLQNDRLFLYYLQNGKDMYTGKALDINQLSSYDIDHIIPQAFIKDDSLDNRVLTSSKDNRGKSDNVPSIEVVQKRKAFWQQLLDSKLISERKFNNLTKAERGGLDERDKVGFIKRQLVETRQITKHVAQILDARFNTEVNEKDKKNRTVKIITLKSNLVSNFRKEFKLYKVREINDYHHAHDAYLNAVVAKAILKKYPKLEPEFVYGDYQKYDLKRYISRSPKDVEKATEKYFFYSNLLNFFKEEVHYADGTIVKRENIEYSNDTGEIAWNKEKDFATIKKVLSLPQVNIVKKTEEQTGGLFDNNIVSKKDASKLIPIKSSLSPEKYGGYARPTIAYSVLVIADIEKGKAKKLKRIKEMVGITIQDKKKFEANPITYLEERGYKNINSNLIIKLPKYSLFEFNDGQRRLLASSIELQKGNELILPYHLTALLYHAQRINKINGEPIHKEQKQQYVETHQNEFKELLTTIISLSKKYIQKPNVESLLQQAFDQNADKDIYQLSESFISLLKLTSFGAPGAFKFLGVEISQSRYKSVSQFLNATLIHQSITGLYETRIDLSKLGED

SEQ ID NO: 179 - protein, 1368 aa, Artificial Sequence
  1368 residue - joint ancestral sequence reconstruction method - node 60
MKKEYSIGLDIGTNSVGWAVTDENYKLVRKKMKVLGNTDGKSKGKALWGARLFDSAETAEERRMHRTTRRRYTRRRQRIELLQEIFQEEISKVDPSFFIRLNESRLHPEDKTDDRHPLFGDKETDKDYHKQYPTIYHLRKHLMENDEKHDIRLVYLALHHIIKHRGHFLIEGDLSSKNTDVEELFKQLVQVFNDALEEEHLSEEAIDIEEILTDKKSRSARAKEVVKLFASEKKQACISALLKLIVGLKGNLKKVFGDSEDTAIHFSKDNYEEDVEAIRDTIPDEYSELFEAIKALYDAIVLSGILGGSTNNTEAKVSASMIARYEQHRKDLKQLKNFVKTYLPEKYNEIFSDDTKNGYSAYIKGGTSQEDFYKYLKKILKELEEAEYLLEEIENENFLPKQRTSDNGVIPYQIHLEELRAILKNQGKYYPFLKENAEKIESILAFRIPYYVGPLSRGNGRFAWMIRKEDGVITPWNFDEVVDKEKSAEEFIERMTNNCTYLPGETVLPKNSLLYEKFTVLNELNNVRLTIDKGKWRERFSAEQKQEIFDDLFRKNRKVTKKKLEDYLKREYGEFDSADISGIDGEFKSSLGSYHDFCKILVKADSLDEEDYKDIIEEIIKWKTVFEDRKMLKRRLEKYSEILTEEQIKKICKRHYTGWGRLSRKLLTGVRDKETGKSIIDVLRETDPSNRNFMQLLSDEDLGFQEEIEQLNAEKAGENLKEIVEDLPGSPAVKRGINQALRIVDEIVKVMGGHEPKRIFVEMAREKQQSKRGRRSTKKRLKRLQEALKNLGTNLWKELLRDDNELRNDRLFLYYTQMGKCMYSGEPIDLDDLSNYDIDHIIPQSFIKDDSLDNRVLVSREENARKTDNLPSPEIRRKMKPFWQMLLNAGLISKKKFDRLTRTDRGEFTEDELAGFIARQLVETRQITKHVATLLKQRYPTEKDEEDKTIKNTKIVSVKANLVSEFRQDFGLIKCREVNDYHHAHDAYLNAVVGNALLKKYPNLAAEFIKGDYRRNNLRKLIAKSAREENKANAKMHFYGNIMNSFTSDEPIADGTIIERPLIETNKETGEIVWDKEKDIATVRKVMNYHQVLITRKVEEETGGFFDQTILSKGNSKKLIPLKKNLDPEKYGGYNSPTAAYSVLVEYDIEKGKAKKEKTVKQLVPIPVREKAALEKNPIKYLEKKGYENPKVNLLIKIPKNSLLELDGGRRRIRAAAKELKNATQLVLPAEEYTLLEKVAKIAEKNSNSESIAKKEGYVEELLAQFDELLDSLIDYSPKLALQDKTLEKLKEAFEKLNLADKKEVAKEIIGLLHCTATTANTALKSLGGSKNRMRYTSIKKLNNASLIHQSITGLYETRIDLGKLGED

SEQ ID NO: 180 - protein, 1368 aa, Artificial Sequence
  1368 residue - joint ancestral sequence reconstruction method - node 61
MKKEYSIGLDIGTNSVGWAVTDENYKLVRKKMKVLGNTDGKSKGKALLGARLFDSAETAEERRMHRTTRRRYTRRRWRIELLQEIFQEEISKVDPSFFIRLNESRLHPEDKTDDRHPLFGDKETDKDYHKQYPTIYHLRKHLMENDEKHDIRLVYLALHHIIKHRGHFLIEGDLSSKNTDVEELFKQLVQVFNDALEEEHLSEEANDIEEILTDKKSRSARAKEVVKLFASEKKQACISALLKLIVGLKGNLKKVFGDSEDTAIHFSKDNYEEDVEAIRDTIPDEYSELFEAIKALYDAIVLSGILGGSTNNTEAKVSASMIARYEQHRKDLKLLKNFVKTYLPEKYNEIFSDDTKNGYSAYIKGGTSQEDFYKYLKKILKELEEAEYLLEEIENENFLPKQRTSDNGVIPYQIHLEELRAILKNQGKYYPFLLENAEKIESILAFRIPYYVGPLSRGNGRFAWMIRKEDGVITPWNFDEVVDKEKSAEEFIERMTGNCTYLPGETVLPKNSLLYEKFTVLNELNNVRLTIDKGKWRERFSAEQKQEIFDDLFRKNRKVTKKKLEDYLKREYGEFDSADISGIDGEFKSSLGSYHDFCKILVKADSLDEEDYKDIIEEIIKWKTVFEDRKMLKRRLEKYGEILTEEQIKKICKRHYTGWGRLSRKLLTGVRDAETGKSIIDVLRETDPSNRNFMQLLSDEDLGFQEEIEQLNAEKAGENLKEIVEDLPGSPAVKRGINQALRIVDEIVKVMGGHEPKRIFVEMAREKQQSKRGRRSTKKRLKRLQEALKNLGTNLWKELLRDDNELRNDRLFLYYTQMGKCMYSGEPIDLDDLSNYDIDHIIPQSFIKDDSLDNRVLVSREENARKTDNLPSPEIRRKMKPFWQMLLNAGLISKKKFDRLTRTDRGEFTEDELAGFIARQLVETRQITKHVATLLKQRYPTEKDEEDKTIKNTKIVSVKANLVSEFRQDFGLIKCREVNDYHHAHDAYLNAVVGNALLKKYPNLAAEFIKGDYRRNNLRKLIAKSAREENKANAKMHFYGNIMNSFTSDEPIADGTIIERPLIETNKETGEIVWDKEKDIATVRKVMNYHQVLITRKVEEETGGFFDQTIYSKGNSKKLIPLKKNLDPEKYGGYNSETAAYSVLVEYDIEKGKAKKEKTVKQLVPIPVREKAALEKNPSKYLEKKGYENPKVNLLIKIPKNQLLELDGGRRRIRAAAKELKNATQLVLPAEEYTLLEKVAKIAEKNSNSESIAKKEGYVEELLAQFDELLDSLIDYSPKLALQDKTLEKLKEAFEKLNLADKKEVAKEIIGLLHCTATTANTALKSLGGSKNRMRYTSIKKLNNASLIHQSITGLYETRIDLGKLGED

SEQ ID NO: 181 - protein, 1368 aa, Artificial Sequence
  1368 residue - joint ancestral sequence reconstruction method - node 62
TTDEYSIGLDMGTNSVGWAVTDKNGSMAHKKMPTLGNTDGKSKGKPTLGSRLFDAAETAAEARAHRGQRRRYVRRRWRLDLLQGLFQDEINKVDSEFFIRLRQSRLHVEDRADYRWPLFNDTDTEKDYYKRFPTIYHLRKWLMETDEKADIRLIYLAVHNIVKHRGNFLREKNLSSRNADPAEAVRHLRQALNDWLERGYLAEADNHILDILTDSKRRSDQAKEIAKLFGTEQSKACNSALAKAIVGLKAELKNVFGEAEKTAIHLSSDNYEDDVEAIRDAIPDDSGELFQALCALYSAYVLQGLLSYAPGQTEAKISANMVAKYDQYGKDLKLLKNLARTYVSEKYDAFFRGETYEGSSDYVQGYASYDDFQKSVKKLFKQLEEDRYMMKAFGEEKFLRRLKTSDNGSIYYQLHLEELRAILKNQGKHYPFLLEEEEKIESLVSFRIPYYVGPLSRENERFAWSSRMEDAVITPWNWDEIIDRDKSAEEFILRMTGDCTYLQGEPVLPKCSLLYEEFCVLNELNGARWTIDEDDWRERFDAAQREGILHDLFRKTRKVTYKKVADWLEREYENFANAHVRGGQGEFESKLGSYIFFCKDVFKTDSLDEADYKPMIEQIILWNTLFEDRDILKRKIEAYGEHLTDEQIKVICKKRFTGWGRLSRKLLTGIKDADTGRSIIDVLREGNPNSRTFMEVLRDEDLGFQKKIDDFNKDYAGENLMDIVNDLPGSPAIRRSINQAIRIVDEIVSIAGGKEPSNIFIEVTREEDDPRKKGRRTKRRYEAIKNALENFKTDLWKELLKKDSNNLDERLSLYFMQRGKCMYSGRPIKLEELHKYEVDHIIPRSYIKDDSLENKVLVCREENQRKTDTLLDPAIRRKMGKYWRMLHNAKLIGDKKFNNLFRRDRGEIDDKTLKGFVARQLVETSQMVKLVQTLLEARYPTEKDEEDKTIKNTKIVPVKANISHDLREAAGLVKCREANDFHHAHDAYLACRVGLFIQKRHPSVYANHIMRDYARKQLRKLIAKSAREYNKTHSMAHTKGFIVNSFMSSEFDKDGTIIERPLIETNKETGEIFWDAEAEVEDIRRVLNYRQCFISRMPVEDTGAFWDQTIYSPRSNKKLLPLKRDLDPDKYGSYSREQFAYSVFFIYDIEARDAKKEKTVLQFAQVPVRVTAAIAKDPSKYASKLGQENLEFTRIIRILKKQLLELDNGDRLIITGAKEVRNATEFAFSLEETTLVERCAQIAKEGSNPEDIASDEGYVEQLSAQLNELFSSLIERGPKLGVRLHAQLKLDQYLRKFDDAALRDKAKVIIGLISITNGATNTALSSLGGSKNRMRYTHNKLLNNASLIDQSVTGMFERRTHIGLLGED

SEQ ID NO: 182 - protein, 1368 aa, Artificial Sequence; identical to SEQ ID NO: 179
  1368 residue - joint ancestral sequence reconstruction method - node 63

SEQ ID NO: 183 - protein, 1368 aa, Artificial Sequence
  1368 residue - joint ancestral sequence reconstruction method - node 64
MKKEYYIGLDIGTNSVGWAVTDENYNLVKRHMKVLGNTDGKSKGKAMWGVRLFDTAETAEERRMYRTSRRRLQRRKQRIELLQEIFSEEISKVDPSFFIRLNESRLHPEDKTEDRYPLFVDKETDKDYHKQYPTIYHLRKELMENDEPHDIRLVYLALHHIIKHRGHFLIEGDLSSKNTDLGEVFSQLVKVFNDALEIELLSEEALEIEEILTDKKSKSAKAKEVVKLFASEKKQACIKALLKLIVGLTGNLSEIFGDSEDTSINFSDSNYEENVEAIEDTIPDEFSELIEAIKALYDWAVLVGILGGSTYISEAKVKASMIARYEKHRKDLKQLKNLVKTYLPEEYKEIFSSDKKNGYSAYIKNGCSQEDFYKYLKKILKELEEAEYLLEEIENETFLPKQRSKDNGVIPYQVHLQELKKILKNAGEYLPFLKENAEKIESIFEFRIPYYVGPLSRGNGSNAWMIRKEDGKIYPWNFDDVVDVEKSAEEFIERMTNKCTYLPGEDVLPKNSLLYSKFMVLNELNNLRIDGDKIKWRERFSVELKQEIYNDLFCRNRKVTGKKLKDYLKREYGELDEADISGIDGDFKSSLGSYHDFKKILGKGNSLDEEDYKDIIEEIIKWKTIFDDKKMLKRRLKKYPEILSEEQIKKICKLKYTGWGRLSREFLTGVRDKETGESIINALWETDPSNDNLMQLLSNQDYGFQEEIEQLNAEKAGENSYETVEDLYVSPAVKRAIWQTLQIVEEIVKVMGGHEPKRIFVEMAREKQQNKRGRTSRKKRLKELYKSCKNDATNLWKELLRDDNELRSDKLFLYYTQMGKCMYSGEPIDLDDLFNYDIDHIYPQSKIKDDSLDNRVLVRKELNAKKTDNLPSPEIREKMKPFWQMLLNKGFISKKKYDRLTRTTRGEFTEDELAGFIARQLVETRQSTKAVAELLKQLYPTEKDEEDKTIKNTEIVYVKANLVSEFRQDFDLIKCREVNDYHHAKDAYLNIVVGNVYHVKYTNNAAKFIKGNRGRNYLRKLIAKSAREENKANAKMHFYGNIKKMFTSDVPIADGTIIERPLIETNKRNGEIVWDKDKSIATVRKVMNKNNILYTRYTYEEKGGLFDQTILKKGNSQKLIPLKKNLDPEKYGGYNSPTAAYFALVEYDIEEGKKKKEKTTKQLVPIPVYEKAKLESNAIKYLEERGLKNPKVNLLIKIKKNSLLEMDGYRMRIRGATIIFKNAVQLVLDEENYKILKKVAKVLEKNSENQTIAKKEGYTEELLALYEELLDKLKDYKNRLANQAKTLEKGKEAFEKLNLEDKAEVINEIIRLFHCNATTANNALKLIGGSKNRMTNNNISKSNKVSLIHQSITGLYETKIDLGKIGED

SEQ ID NO: 184 - protein, 1368 aa, Artificial Sequence
  1368 residue - joint ancestral sequence reconstruction method - node 65
MKKEYYLGLDIGTNSVGWAVTDENYNLVKRHMKVLGNTDGKSKGKAMWGIRLFDTAETAEERRMYRSSRRRLQRRKQRIELLQEIFSEEIAKVDPTFFIRLNESRLHPEDKTEDKYPLFVDKETDKDYHKQYPTIYHLRKELIENPEPHDIRLVYLALHHIIKHRGHFLIEGDSDSKNTDLSEVFSELVKVFNDALEIELLSTEALELEEILTDKKSKSAKAKEVAKLFADEKEQQCIKALSKLIVGLTGNISEIFHQSEDTSINFSDSNYEENVEAIEDTIPDEFSELIDAIKALYDWAVLVGILGGSTYISEAKVKASMIARYEKHRKNLKQLKNLVKTYLPEEYKEFFSSDEKNGYSAYIKNGCSEEDFYKYLKKILKEKEEAEYLLAEIENETLLPLQRSKDNGTIPYQVHLQELKKILENAGEYLPFLKENAEKIISIFEFRIPYYVGPLSRGNGSNAWMIRKEDGKIYPWNFDDVVDVEKSNEEFIERMTNKCTYLPGEDVLPKNSLLYSKFMVLNELNNLKIRGNKIKWRERFSVELKQEIYNDLFCRNRKVTGKKILDYLKREYGELDEADISGIDGDFKSALASYHDFKKLLGKGNSLDEEDYKEIIEEIIKWKTIYDDNKMLKRMLKKYPEILSEEQIKKICKLKYTGWGNFSREFLTGVRGKETGESIINALWETDPSNDNLMQLLSNQDYSFQEEIDQINAEKAGENSYETVEDLYVSPANKRAIWQTLQIVEEIVKVMGGHEPKRIFVEMARGKEKNKKRTTSRKKRLKELYKSCKNDTTNLWKELLRDDNELRSKKLFLYYTQMGKCMYSGEPIDLDDLLNWDIDHIYPQSKIKDDSLDNMVLVRKELNAKKTNNLLSPEIREKMKPFWQMLLNKGFISKKKYDRLTRTTRGEFTEEELSGFIARQLVETRQSTKAVAELLKQLYPTEKDEEDKTIKNSEVVYVKANLVSEFRQDFDLLKCREVNDYHHAKDAYLNIVVGNVYHVKYTNNPAKWIKGNRDSNYLRKLIAKSAREENKANAKMHFYGSIKKMFTSDVKNADGTIIERPLIETNKRNGEIVWNKDKSIDQIRKIMNKNNILYTEYTYCEKGQLFNQTILKKGNSEKLIPLKKNLDPEKYGGYTSPKASYFALVEFDIEEGKKKKEKTTKQLIPVPVYEKAKLESNAIKYLEERGLTNVVVNLKIKIKKNSLLEMDGYRMRIRGATIIFKNAVQLVLDEENYEILRKVEKYLEKNSENQTIAKKEGFTEELLSLYEELLDKLKDYKNRPANQAKTLEKGKEAFESLNLEDKAEVINEIIRLFHCNATTASNALKLINGSKNRMTNKNILKSNKVKLIHQSITGLYETKIDLGKIGED

SEQ ID NO: 185 - protein, 1368 aa, Artificial Sequence
  1368 residue - joint ancestral sequence reconstruction method - node 66
MKKEYYIGLDMGTNSVGWAVTDENYNLCKRHMKVLGNTDGKSKGKAMWGVRLFDTAETAEERRMFRTSRRRLQRRKQRIELLQEIFSEEISKVDPSFFLRLNESKLYPEDKTELPYALFVDKETDKDYHKQYPTIYHLRKELMENDEPHDIRLVYLALHHIIKHRGHFLFEGDLSSKNTDFGAVFSQLLKVINDELEIELLSEEALQIEEILKDKKSKSAKATEVVKLLASEKKQACIKALLKLISGLTVKLSEIFGDGERTSISFADSNYEENVEAIEDTLPERFSELIEAIKALYDWAVLVDILGGSTYISEAKVKTSMIARYEKHRKDLKQLKNLVKTYLPEEYKEIFSSDKKNNYSAYIKNGCSQEDFYKYLKKNLKELEEAEYLLEEIENETFLPKQVSKDNGVIPYQVHLSELKKILKNAGEYLPFLKENAEKIEQIFEFRIPYYVGPLNRGNGENAWMVRKEDGKIYPWNFDNVVDVEKSAEEFIERMTNKCTYLPGEDVLPKNSLLYSKFMVLNELNNLRIDGEKIKWRERFSVELKQEIYNDLFCRNRKVTGKKLKDYLKREGGELKEAEISGIDGDFKSSLRSYHDFKKILGKGNSLDEEDTKDIIEEIIKNITIFDDKKMLKRRLKKYPEILSEEQIKKICKLKYTGWGRLSREFLTEVRDKETGENIINALWETDPSNDNLMQLLSNQDYGFQEEIEQLNAEKAGENSYETVEDLYVSPAVKRAIWQTLQIVEEIVKVMGGHEPKRIFVEMAREKQQNKRGRTSRKKRLKELYKSCKNDATDLWKELLRDDNELRSDKLFLYYTQMGRCMYSGEPIDLEDLFNYDIDHIYPQSKVKDDSLDNRVLVKKELNAKKTDNYPSPEIREKMKPFWQMLLNKGFISKKKYDRLTRTTRGEFTEDELAGFIARQLVETRQSTKAVAELLKQLYPTEKDEEDKTIKNTEIVYVKANLVSEFRQDFDFIKCREVNDYHHAKDAYLNIVVGNVYHVKYTNNAAKFIKGNPGRNYLRKLIAKSAREENKANAKMHFYGNLKKMFTSDVPIADGTIIERPLIETNKRNGEIVWDKDKSIATVRKVMNKNNILYTRYSYEEKGGLFDQQILKKGNGQALIPLKKRLDIEKYGGYNKPTAAYFALVEYDIEEGKKGKEKTTKQLVPIPVYEKAKLESNAIKYLEERGLKNPKVNLLIKIKKNSLLEVDGFRMHISGRTIIFKSAVQLVLDEENEKILKKVAKVLEKQSENQKIAKKEGYTEELLALYEELLDKLKDYKIRLANQAKTLENGKEKFEKLNLEDKCQVINEILRLFHCNATTANNALSLIGGAKNIMTNNNISKSNKVSLINQSITGLYETKIDLGKIGED

SEQ ID NO: 186 - protein, 1368 aa, Artificial Sequence
  1368 residue - joint ancestral sequence reconstruction method - node 67
MKKEYYVGLDMGTGSVGWAVTDENYNICKRHMKVLGNTDGKSKGKAMWGVRLFETAKTAEERRMFRTSRRRLQRRKQRIELLQEIFAEEISKVDPGFFLRMKESKYYPEDKPELPYALFVDKETDKDYHKQYPTIYHLRKMLMENEEPHDIRLVYLALHHIIKHRGHFLFEGDISSKVTDFGAAFSQFLKVINDELEIELLDEEALQIEEILKDKKSKSAKKTELVKLLAAEKKQACEKALLKLISGCTVKLSEIFGDGERTKISFADSNYEEYVAAVEDTLAERFLELIEAAKALYDWAVLVDILGGSTYISEAKVKTSMIARYEKHRKDLKQLKNLVKTYLPEEYKDIFSSDKKNNYSAYIKNGCSKEDFYAFLKKNLKELEEAEYLLEEIENETFLPKQVSKDNGVIPYQVHLSELKKILKNAGEYLPFLKENAEKIEQIFEFRIPYYVGPLNKGNGENAWAVRKEDGKIYPWNFENVIDVEESAEKFIGRMTNKCTYLPGEDVLPKDSLLYSKFMVLNELNNLRIDGEKIKWRERFSVELKQEIYEDVFCRYRKVTGKKLKDYLIREGIIGKEAEISGIDGDFKSSLRAYHDFKKILGKGKLLDVELTQNEKEEIIKNITIFDDKKMLKKRLKKYPEILSEKQIKKICALKYTGWGRLSREFLEEVQAKETGENIITALWETDPSNDNLMQLLSNQDYGFQEEIEQLNAEKAGKNSYETVEDLYVSPAVKRPIWQTLQIVEEIEKVMGGHKPKRIFVEMAREKQQNKRGRTSRKKRLKELYKSCKNEAPDLWKELLHDDNKLRSDKLFLYYTQMGRCMYSGEPIDLEDLFKYDIDHIYPQSKVMDDSLDNRVLVKKELNAKKTDNYPSAEIREKMKPFWDMLLNKGFISKEKYDRLTRNTRGEFTENELAGFIARQLVETRQSTKAVAELLKQAYPTEKDEEDKTIKETEIVYVKANTVSEFRQDFDFIKVRDVNDYHHAKDAYLNIVVGNTYYVKFTKNAAWFIKGNPGRTYLRKLIAKSAREENKANAKMHFYGNLKKMFTSDVAIADGTIIERPLIETNKRNGEIAWGKDGTIVTVRKVMNKNNILFTRRSYEVKGGLFDQQIMKKGKGQALIPVKERLSIEKYGGYNKATGAYFMLVESDIEEGKKGKEKTTKQLVPIPVYEKAKLESNAIRYLEERGLKNPKVNLLIKIKKDSLFEVDGFRMHLSGRTLIFKCANQLVLDEENEKILKKVAKVLEKQKKNVKISKKDGYTEELLAKYEEFLDKLKDYNIRLSTQAKTLENGKEKFEKLSLEDKCQVINEILHLFQCQSTAANNALSLIGGAGNILVNNNISKCNKVSIINQSITGLYEQEIDLKKIGED

SEQ ID NO: 187 - protein, 1368 aa, Artificial Sequence
  1368 residue - joint ancestral sequence reconstruction method - node 68
MKKEYYVGLDMGTGSVGWAVTDESYHICRRHMKVLGNTDGKSKGKAMWGVRLFETAKTAEERRMFRTSRRRLDRRKRRIELLQEIFAEEISKVDPGFFLRMKESKYYPEDKPELPYALFVDKETDKDYHKQYPTIYHLRKMLMENEEPPDIRLVYLALHHMIKHRGHFLFAGDISEKVTDFGAAFSQFLKVIKDELDIELLDEEALQIEEILKDKLTRSAKKTELVKGLKAEKKNACEKALLKLISGCTVKLSEIFGDGERPKISFADSNYEEYVAVVEDELGERFLEIIEAAKALYDWAVLVDILGGSTSISEAKVRTSMIARYEKHRKDLKYLKNLVKTYLPEEYKDIFSSDKKNNYSAYIKNGCSKEDFYAFLKKNIKELEEAEYLLEELEKETFLPKQVSKDNGVIPYQVHLSELKKILKNAGEYLPFLKENAEKIEQIFEFRIPYYVGPLNKGNGEFAWAVRKSNEKIYPWNFENVIDVEASAEKFIRRMTNKCTYLPGEDVLPKDSLLYSKFMVLNELNNLRIDGEKIKWRERFSVELKQEIYEDVFCRYRKVTAKKLKDYLIREGIIGKDAEISGIDGDFKGSLRAYHDFKKILGKGKLLDVELTQNEKEEIILNITLFDDKKLLKKRLKKYPQILTEKQIKKICALNYTGWGRLSREFLEEVQAPETGENIITALWETDPSNDNLMQLLSNQDYGFQEEIEQLNAEKAGKNSYETVEDLYVSPAVKRQIWQTLQIVKEIEKVMGGEKPKRVFVEMAREKQENKRGRTSRKKRLKDLYKSCKNEEPDWWKELLHEEHKLRSDKLFLYYTQKGRCMYSGEPIDLEDLWKYDIDHIYPQSKVMDDSLNNRVLVKKEYNAKKTDNYPSAEIRQKMKPFWDSLLNGGFISKEKYDRLIRNTRGEFTANELAGFIERQLVETRQSTKAVAEILKQAFPTEKDEEDKTIKETEIVYVKAKTVSEFRQDFDFIKVRDVNDFHHAKDAYLNIVVGNTYYVKFTKNAAWFIKGNPGRTYLRKLIAKSAREENKANAKMHFYGNLKKMFTSDVAIADGTIIERPLIETNKRNGEIAWGKSGTIVTVRKMMNKNNILFTRRSYEVKGGLFDQQIMKKGKGQALIPVKERLSIEKYGGYNKATGAYFMLVESDIEEGKKGKEKTTIEFVPIPLYEKAKLESNEARFLEERGLKEPKVNLLIKIKKDTLFEVDGFKMHLSGRTLIFKCANQLILDEENEKILKKVAKVIERQKKNVKISKKDGYTEELLAKYEEFLDKLKNYGIRLSTQAKTLENGKEKFEKLSLEDKCQVLNEILHLFQCQSSAANNALSMIGGPGNILVNNNISKCNKISIINQSPTGIYEQEIDLKKIGED

SEQ ID NO: 188 - protein, 1368 aa, Artificial Sequence
  1368 residue - joint ancestral sequence reconstruction method - node 69
MEKEYYVGLDMGTGSVGWAVTDESYHILRRHMKVLGNTDGKSKGKAMWGVRLFESAKTAEERRMFRTSRRRLDRRNWRIEILQEIFAEEISKVDPGFFLRMKESKYYPEDKPELPYALFVDKETDKDYHKKYPTIYHLRKMLMETEETPDIRLVYLALHHMMKHRGHFLLSGDISEKVTEFGTTFSQFLENIKNELDFELLDEEALQIEEILKDKLTRSAKKTKLVKGLKAEKKNVCEKALLKLLSGGTVKLSDIFGMGERPKISFADNGYEEYVAVVEDELGERFYEIIEAAKAVYDWAVLVDILGGSTSISEAKVRTSMIARYEKHKSDLKYLKNIVKKYLPEEYKDIFSSDKLNNYSAYIKNGCSKEEFYDFLKKNIKELEEQEYLQEELEKETFLPKQVNKDNGVIPYQVHLYELKKILDNLGDKIPFLKENAEKIEQLFEFRIPYYVGPLNKGNGEFAWAVRKSNEKIYPWNFENVIDVEASAEKFIRRMTNKCTYLMGEDVLPKDSLLYSKFMVLNELNNLRLDGEKIKWRERFSVELKQKIYEDVFCRYRKVTAKKLKNYLIREGIIGKNVEITGIDGDFKGSLTAYHDFKKILGKGKLLDVELTQNEKEEIILNITLFDDKKLLKKRLKKYPQILTEKQIKKICALSYTGWGRLSKKFLEEVTAPETGENIITALWETDPSNDNLMQLLSNEDYRFQEEIEQFNAEKAGKNSYETVEDLYVSPAVKRQIWQTLQIVKEIEKVMGGEKPKRVFVEMAREKQENKRGRESRKKRLSDLYKSCKNEEPDWWKELLHEEHKLRSDKLYLYYTQKGRCMYSGEPIDLEDLWKYDIDHIYPQSKTMDDSLNNRVLVKKEYNAKKSDNYPSADIRQKMKPFWKSLLNGGFISKEKYDRLIRNTRGELTANELAGFIERQIVETRQSTKAVAEILKQVFPTEKDEEDKTIKETEIVYVKAKTVSKFRQDFDFIKVRDVNDLHHAKDAYLNIVVGNTYYVKFTKNAAWFIKENPGRTYLRKLIAKSAREENKANAKMHFYGNLKKMFTSDVAIADGTIIERPLIETNKRNGEIAWGKSGTIVTVRKMMNKNNILVTRRSYEVKGGLFDQQIMKKGKGQALIPVKERLSIEKYGGYNKAAGAYFMLVESDIEEGKKGKEKTTIEFVPIPLYEKAKLESDEARFLEERGLKEPKVNILIKKIKDTLFEVDGFKMWLSGRTLIFKCANQLILDEENMKTLKKVVKFIQRQKKNVKISKKDGITEEVLMKYETFLDKLKNYGIRLSTQAKTLVNGKEKFEKLSLEDKCQVLYEILHLFQCQSSAANNALKMIGGPGNILVNNNISKCNKISIINQSPTGIYEKEIDLLKIGED

SEQ ID NO: 189 - protein, 1368 aa, Artificial Sequence
  1368 residue - joint ancestral sequence reconstruction method - node 70
MKKEYSIGLDIGTNSVGWAVITDDYKLVRKKMKVLGNTDKKSIKKNLWGARLFDSGETAEDTRLKRTTRRRYTRRRNRICYLQEIFQEEMNKVDDSFFHRLDESFLVPEDKKHDRHPIFGNLEEEVAYHEQYPTIYHLRKHLADSSEKADLRLVYLALAHIIKYRGHFLIEGDLNTENTDVEELFKQFVQVYNQTFEEQHLSEETIDVEEILTEKVSRSRRAENVIKLFPNEKKNGLFGQLLKLIVGLQGNFKKVFDLSEDAKLQFSKDTYEEDLEALLANIGDEYADLFLAAKNLYDAILLSGILTTTDNNTKAKLSASMIERYEEHKKDLAQLKQFIKEHLPEKYNEIFSDSSKNGYAGYIDGKTSQEDFYKYLKKILSKIDGAEYFLEKIEQENFLRKQRTFDNGVIPHQIHLEELRAILRRQGKYYPFLKENQEKIESILTFRIPYYVGPLARGNSRFAWLIRKSDEAITPWNFDEVVDKEKSAEAFIERMTNYDTYLPNEKVLPKHSLLYEKFTVFNELTKVRYVTDRGKTRERFSAEQKQEIFDDLFKKNRKVTKKKLEDYLKKEYEEFDSADITGIEDEFNASLGTYHDLLKILVSKDFLDDEENEDILEDIVKILTVFEDRKMIRKRLEKYSDILTEEQLKKLERRHYTGWGRLSAKLINGIRDKQSGKTILDYLIDDDSSNRNFMQLINDDNLSFKEEIEKAQAIKETENLKEIVQDLPGSPAIKKGILQSLKIVDELVKVMGGHEPKNIVVEMARENQTTNRGRRNSKQRLKRLEEALKNLGSNLLKEHPVDNQQLQNDRLYLYYLQNGKDMYTGQELDIDNLSNYDIDHIIPQSFIKDNSIDNRVLVSSEENRGKSDNVPSKEVVRKMKPFWQKLLNAGLISQRKFDNLTKAERGGLTEDDKAGFIKRQLVETRQITKHVATILDQRFNTEKDEEDKTIRNVKIITLKSNLVSQFRKDFGLYKVREINDYHHAHDAYLNAVVGTALLKKYPKLEPEFVYGDYRKNNLRKLIAKSAREENKATAKMHFYSNIMNFFSSEEPIADGTIIERPLIETNKETGEIVWDKEKDIATVRKVLSYHQVNIVKKVEVQTGGFSKETILPKGNSNKLIPRKNNWDPKKYGGFDSPTVAYSVLVTYDIEKGKAKKLKTVKELVGITIMERSAFEKNPIAYLEKKGYQNPKENLLIKLPKYSLFELENGRRRMLASAKELQKGNQMVLPAHLVTLLYHAKRIDESNSNSESLEQKQEYVEEHRAQFDELLDYIIDFSEKYILADKNLEKIKELYEENNEADIKELAKSFINLLTFTAMGAPAAFKFFGENIDRKRYTSIKELLNATLIHQSITGLYETRIDLGKLGED

SEQ ID NO: 190 - protein, 1368 aa, Artificial Sequence
  1368 residue - joint ancestral sequence reconstruction method - node 71
MKKEYTIGLDIGTNSVGWAVITDDYKLVRKKMKVLGNTDKKSIKKNFWGVRLFDSGETAEDTRLKRTTRRRYTRRRNRICYLQEIFQEEMNKVDDNFFHRLDESFLVPEDKKHDRHPIFGTLEEEVAYHEQYPTIYHLRKHLADSSEKADLRLVYLALAHIIKYRGHFLIEGELNTENTSVEELFKQFVQVYNQTFSEQELVDETIDVEEILTEKVSRSRRAENVLKLFPNEKSNGLFGQFLKLIVGNQGNFKKVFDLEEDAKLQFSKDTYEEDLEALLANIGDEYADVFLAAKNLYDAILLSGILTTTDNNTKAKLSASMIERYEEHKKDLAQLKQFIKEHLPEKYNEIFNDSSKNGYAGYIDGKTSQEDFYKYLKKILSKIDGAEYFLEKIEQENFLRKQRTFDNGVIPHQIHLEELRAILRRQGKYYPFLKENQEKIESILTFRIPYYVGPLAKGNSRFAWLIRKSDEPIRPWNFDEVVDKEKSATAFIERMTNYDTYLPNEKVLPKHSLLYEKFTVFNELTKVRYVDDRGKTQERFSAEEKQEIFDDLFKKNRKVTKKKLENYLKNEYQYIDSPTIKGIEDEFNASFGTYHDLLKIGVSKEFLDDEENEDILEDIVKILTVFEDRKMIRKQLEKYSDILSEETLKKLERRHYTGWGRLSAKLINGIRDKQSGKTILDYLIDDDSSNRNFMQLINDDNLSFKEEIEKAQAIKETENLKEIVQDLPGSPAIKKGILQSLKIVDELVEIMGGYEPKNIVVEMARENQTTNRGKRNSKQRLKRLEEALKELGSNLLKEHPVDNQQLQNDRLYLYYLQNGKDMYTGQELDIDNLSNYDIDHIIPQSFITDNSIDNRVLVSSKENRGKSDNVPSKEVVRKMKPFWQKLLNAGLISQRKFDNLTKAERGGLTEDDKAGFIKRQLVETRQITKHVATILDQRFNTEKDEEDNTIRNVKIITLKSALVSQFRKTFGLYKVREINDYHHAHDAYLNAVVATTLLKVYPQLEPEFVYGEYRKNNLRKLIAKSAHEENKATAKKHFYSNIMKFFSSEEPIIDGTIIERPLIETNKENGEILWDKEKDIATVKKVLSYHQVNIVKKVEIQKGGFSKETIQPKGNSNKLIPRKNNWDPKKYGGFDSPTVAYSVLITYDIEKGKKKKLKRVKEIVGITIMERSAFEKNPIAYLEKKGYQNPKENVLMKLPKYSLFELENGRRRMLASAKELQKGNQMVLPAHLVTLLYHAKRIDESNFNSESLEQKQEYVEEHRAQFDELLDYIIDFSEKYILADKNLEKIKKLYEENNEADIKELAKSFINLLTFTAMGAPADFKFFGENIPRKRYTSIKELLNATLIHQSITGLYETRIRLGKLGED

SEQ ID NO: 191 - protein, 1368 aa, Artificial Sequence
  1368 residue - joint ancestral sequence reconstruction method - node 72
MKKEYTIGLDIGTNSVGWAVITDDYDLVRKKMKVLGNTDKKKIKKNFWGVRLFDEGETAEDTRLKRTTRRRYTRRRNRISYLQEIFQEEMNKVDENFFHRLDESFLVPEDKKHDRHPIFGTLEEEVAYHEQYPTIYHLRKHLADSSEKADLRLVYLALAHIIKYRGHFLIEGELNTENTSVEETFKQFLQVYNQTFSEQELVDETIDVEEILTEKVSRSRKAENVLKLFPNEKSNGLFGQFLKLIVGNQGNFKKVFDLEEDAKLQFSKETYEEDLEALLANIGDEYADVFLAAKNVYDAIELSGILSTTDNNTKAKLSASMIERYEEHKKDLAQLKQFIKEHLPEKYNEIFKDSSKNGYAGYIDGKTSQEDFYKYIKKILSKIDGAEYFLEKIEQENFLRKQRTFDNGVIPHQIHLEELRAILDRQGKYYPFLKENQEKIESLLTFRIPYYVGPLAKGNSRFAWLIRKSDEPIRPWNFDEVVDLEKSATRFIERMTNYDTYLPNEKVLPKHSLLYQKFTVFNELTKVRYIDDRGKTQENFSSEEKQEIFDDLFKKNRKVTKKDLENYLKNEYQYIDSPTIKGIEDSFNASFSTYHDLLKIGVSKEFLDDEENEEILEDIVKILTVFEDRKMIRKQLEKYSDILSEETLKKLERRHYTGWGRLSAKLINGIRDKQSNKTILDYLIDDDGSNRNFMQLINDDNLSFKEEIEKAQAIKETENLKEIVQDLPGSPAIKKGILQSLKIVDELVEIMGGYEPKNIVVEMARENQTTNRGKRNSKQRLKRLEEALKELGSNLLKEHPVDNQQLQNDRLYLYYLQNGKDMYTGQELDINNLSNYDIDHIIPQSFITDNSIDNRVLVSSKENRGKSDNVPSKEVVRKMKPFWQKLLRAGLISQRKFDNLTKAERGGLTEDDKAGFINRQLVETRQITKHVANILDQRFNTEKDEEGNTIRNVKIITLKSALTSQFRKTFGLYKVREINDYHHAHDAYLNAVVATTLLKVYPQLEPEFVYGEYRKNNLRKLIAKSAFKENKATAKKHFYSNIMKFFSSEEPIIDGTIIERPLIETNKENGEILWDKEKDIATIKKVLSYHQMNIVKKVEIQKGGFSKETIQPKGNSNKLIPRKNNWDPKKYGGFDSPTVAYSVVITYDIEKGKKKKLKRVKEIVGITIMERSAFEKNPIAYLEKKGYQNPKENVLMKLPKYSLFELENGRRRMLASAKELQKGNQMVLPAHLVTLLYHAKRYDESNFNSESLEQKQEYVNEHRAQFDELLDYVIDFSEKYILADKNLEKIKKLYEENNEADIKELAKSFINLMTFTAMGAPADFKFFGENIPRKRYTSIKELLNATLIYQSITGLYETRIRLGKLGED

SEQ ID NO: 192 - protein, 1368 aa, Artificial Sequence
  1368 residue - joint ancestral sequence reconstruction method - node 73
MKKEYTIGLDIGTNSVGWAVITDDYDLVRKKMKVLGNTDKKKIKKNFWGVRLFDEGETAEDTRLKRTTRRRYTRRRNRISYLQEIFQEPMSEVDENFFHRLDESFLVPEDKKYDRHPIFGTLEEEVAYHEQYPTIYHLRKHLADSSEKADLRLVYLALAHIIKYRGHFLIEGELNTENTSISETFEQFLDVYNQTFSEQELVDETIKVEEILTEKVSRSRKAENVLKLFPNEKSNGLFGQFLKLIVGNQGNFKKVFDLEEDIKLQFSKETYEEDLEALLGNIGDEYADVFLAAKNVYDAIELSGILSTTDNNTKAKLSASMIERYEEHKKDLAQLKQFIKAHLPEKYYEIFKDSSKNGYAGYIDGKTSQEDFYKYIKKILSKTDNAEYFLEKIEQENFLRKQRTFDNGVIPHQIHLEELRAILDRQSKYYPFLKENREKIESLLTFRIPYYVGPLAKGNSRFAWLIRKSDEPIRPWNFDEVVDLEKSATRFIERMTNYDTYLPNEKVLPKHSLLYQKFTVFNELTKVRYIDDRGKTQENFSSEEKIEIFDDLFKKKRKVTKKDLVNYLENEYQYIDSPTIKGIEDSFNASFSTYHDLLKIGVSKEFLDDEENEEILEDIIKILTVFEDRKMIRKQLEKYSDILSEETLKKLERRHYTGWGRLSKKLINGIRDKQSNKTILDYLIDDDGSNRNFMQLINDDTLSFKEKIEKAQAIKETENLKEIVQDLPGSPAIKKGILQSLKIVDEIVEIMGGYEPKNIVVEMARENQTTNRGKRNSKQRLKRLEEALKELDSNLLKEKPLDNEQLKNDRLYLYYLQNGKDMYTGQELDINNLSNYDIDHIIPQSFITDNSIDNRVLVSSKENRGKSDNVPSKEVVRKMKPFWQKLLRAGLISQRKFDNLTKAERGGLTEADKAGFINRQLVETRQITKHVANLLDQRFNTEKDEEGNTIRNVNIITLKSALTSQFRKKFGLYKVREINDYHHAHDAYLNAVVATTLLKVYPNLEPEFVYGEYRKNNLRKLIAKSMFKENKATAKKHFYSNIMKFFSSEEPIIDGTIIERPLIETNKENGEILWDKEKDISTIKKVLSYRQMNIVKKVEKQKGRFYKETIHPKGNSNKLIPIKNNLDPKKYGGFNEPTVAYSVVITYDIEKGKKKKLKRVKEIVGIPIMERSAFEKNPTAYLEKTGYNNPKENVLMELPKYSLFELENGRRRMLASAKELQKGNQMVLPAHLVELLYHAKRYDESNFNSESLEQKQEYVNEHRAQFDELLDYVIDFSEKYINADKNLEKIKKLYEENNEADIKELAKSFINLMTFTAMGAPADFKFFGENISRKRYTSIKELLNSTLIYQSITGLYETRIRLEKLGED

SEQ ID NO: 193 - protein, 1368 aa, Artificial Sequence
  1368 residue - joint ancestral sequence reconstruction method - node 74
MKKNYTIGLDIGTNSVGWAVIKDDYTLVRKKMKVLGNTDKKKIKKNFWGVRLFDEGETAEDTRLKRTTRRRYQRRRNRISYLQEIFQEPMSEVDENFFHRLDESFLVPEDKKYDRHPIFGTLEEEVAYHEQYPTIYHLRKHLADSSEKADLRLVYLALAHIIKYRGHFLIEGELNTENTSISETFEQFLDTYNEIFSEQELVDEITKVEEILTEKVSRSRKAEQVLALFPNEKRNGLFGQFLKLIVGNQGNFKKVFDLEDDIKLQLSEETYEEDLEALLGNIDDEYADVFLAAKNVYDAIELSGILSTDDNNTKAKLSAQMIELYDEHKKDLAQLKQFIKAHLPEKYYEIFKDSSKNGYAGYIDGKTSQEDFYKYIKKILKKTDNAEYFLEKIEQENFLRKQRSFYNGVIPHQIHLQELRAILDRQSKYYPFLKENRDKIESLLTFRIPYYVGPLAKGNSRFAWLERKSDEPIRPWNFDEIVDLEKSAERFIERMTNYDTYLPDEKVLPKRSLLYQKFTVFNELTKVRYIDERGKTQENFSSQEKIEIFDDLFKKKRKVTKKDLVNYLENEYQYIDSPDIKGIEDSFNASFSTYHDLSKIGVSKEFLDDEENEEILEDIIKILTIFEDRKMRKKQLEKYSDTLSEETLKKLERKHYTGWGRLSKKLINGIRDEQSNKTILDYLIDDDGSNRNFMQLINDDTLSFKEKIEKAQAIKETENIKEIVQDLPGSPAIKKGILQSLKIVDEIIEIMGGYEPKNIVVEMARENQTTNRGKNNSKQRLKKLEEALKELDSNHVKEKPLDNEQLKNDRLYLYYLQNGKDMYTGQELDINNLSNYDIDHIIPQSFITDNSIDNRVLVSSTENRGKSDNVPSKEIVRKMKPFWQQLLRAGLISQRKFDNLTKAERGGLTEADRAHFINRQLVETRQITKHVANLLDQRFNTEKDEEGNTIRNINIVLLKSALTSQFRKKFGLYKVREINDYHHAHDAYLNAVVATTLLKVYPNLEPEFVYGEYRKNNLRKLIAKSMFKEDKATAKKHFYSNIMKFFSKEELINDGTIIERPLIETNKENGEILWDKEKDLSTIKKVLSYKQMNIVKKVEKQKGRLYKETIHPKGNSNKLIPIKNNLDPKKYGGFNEPTVAYSVVITYDIEKGKKKKLKRVKEIVGIPIMDRKAFEKHPTAYLEKTGYNNPTENVLHELPKYSLFELENGSRRMIASAKELQKGNQMVLPAHLVELLYHAKRYDESNFNSESLEQKQEYVNEHRAQFDELLDYVIDFSNKYINADKNLEKIKKLYEENNEADIKELVESFINLMTFTAMGAPADFKFFGENISRKRYTSIKELLGSTLIFQSITGLYETRIRLEKLGED

SEQ ID NO: 194 - protein, 1368 aa, Artificial Sequence
  1368 residue - joint ancestral sequence reconstruction method - node 75
MKKEYTIGLDIGTNSVGWAVITDDYDLVRKKMKVHGNTDKKKIKKNFWGVRLFDEGETAEDRRLKRTTRRRYTRRRNRISYLQEIFQEEMNKVDENFFHRLDESFLVPEDKKHDRHPIFGTLEEEVAYHEQYPTIYHLRKHLADSSEKADLRLVYLALAHIIKYRGHFLIEGELNTENTSVEETFKQFLQVYNQTFSEQEPVDETIDVEEILTEKVSRSRKAENVLKLFPNEKSNGMFAQFLKLIVGNQGNFKKVFDLEEDAKLQFSKETYEEDLEALLANIGDEYADVFLAAKNVYDAIELSGILSTTDNNTKAKLSASMIERYEEHKKDLAQLKQFIKEHLPEKYNEIFKDSSKNGYAGYIEGKTSQEDFYKYIKKILSKIDGAEYFLEKIEQENFLRKQRTFDNGVIPHQIHLEELRAIIDRQGKYYPFLKENQEKIESLLTFRIPYYVGPLAKGNSRFAWLIRKSDEPIRPWNFEEVVDLEKSATRFIERMTNYDTYLPNEKVLPKHSLLYQKFTVFNELTKVRYIDDRGKTQENFSSEEKQEIFDDLFKKNRKVTKKDLENYLKNEYQYIDSPTIKGIEDSFNASFSTYHDFLKIGVSKEVLDDEENEEMLEDIVKILTVFEDRKMIRKQLEKYSDVLDEEILKKLERRHYTGWGRLSAKLINGIRDKQSNKTILDYLIDDDGLNRNFMQLINDDNLSFKEEIEKAQAITETENLKEIVQDLPGSPAIKKGILQSLKIVDELVEIMGGYEPKNIVVEMARENQTTSRGKRNSKQRLKRLEEALKELGSNLLKEHPVDNQALQNDRLYLYYLQNGKDMYTGQELDIHNLSNYDIDHIIPQSFITDNSIDNRVLVSSKENRGKSDNVPSKEVVKKMKPFWQKLYRAGLISQRKFDNLTKAERGGLTEDDKAGFINRQLVETRQITKHVANILHQRFNTEKDEEGNTIRNVKIITLKSALTSQFRKTFGLYKVREINDYHHAHDAYLNAVVATTLLKVYPQLEPEFVYGEYRKSNLRKLIAKSAFKENKATAKKQFYSNIMKFFSSEEPIIDGTIIERPLIETNKENGEILWDKSKDIATIKKVLSYHQMNIVKKVEIQKGGFSKETIQPKGNSNKLIPRKNNWDPKKYGGFDSPNVAYSVVITYDIEKGKKKKLKRVKEIVGITIMERSAFEKNPIAYLENKGYQNPKENVLMKLPKYSLFELENGRRRMLASAKEAQKGNQMVLPAHLVTLLYHAKRYDESNFNSESLEQKQEYVNEHRAQFDELLDHVIDFSEKYTLADKNLEKIKKLYEENNEADIKELAKSFINLMTFNAMGAPADFKFFGKNIPRKRYTSIKELLNATIIYQSITGLYETRRRLGKLGED

SEQ ID NO: 195 - protein, 1368 aa, Artificial Sequence
  1368 residue - joint ancestral sequence reconstruction method - node 76
MKKEYTIGLDIGTNSVGWAVITDDYDLVRKRMKIHGNTDKKKIKKNFWGVRLFDEGETAEDRRLKRTTRRRYTRRRNRISYLQEIFKDEMNKVDENFFHRLNESFLVPEDKKHDRHPIFGTLEEEVAYHEQYPTIYHLRKHLADSNEKADLRLVYLALAHIIKYRGHFLIEGELNTENTSVEETFKQFLQEYNQTFSEQEPVDEDIDVEEILTEKVSRSRKAENVLKLFPNEKSNGMFAQFLKLIVGNQGNFKKVFDLEEDAKLQFSKETYEEDLEALLANIGDEYADVFLAAKNVYDAIELSGILSTTDNNTKAKLSSSMIERYEEHKKDLAALKNFIKEHLPEKYNEIFKDSSKNGYAGYIEGKTSQEDFYKYIKKILSKIDGAEYFLKKIEQENFLRKQRTYDNGVIPHQIHLEELRAIIDRQGKYYPFLLENQEKIESLLTFRIPYYVGPLAKGNSRFAWLIRKSDEPIRPWNFEEVVDLENSATRFIERMTNYDTYLPNEKVLPKHSLLYQKFTVFNELTKVRYIDDRGKECENFSSEEKQEIFDNLFKKNRKVTKKDLENYLKNEYQYIDSPTIKGIEDNFNASFSTYHDFLKIGVSREVLDDEDNEEMLEDIVKILTVFEDRKMIRKQLEKYSDVLDEDILKKLERRHYTGWGRLSAKLINGIRDKQSNKTILDYLIDDDGLNRNFMQLINDDNLSFKEEIEKAQLITETENLKDIVQNLPGSPAIKKGILQSLKIVDELVEIMGGYEPKNIVVEMARENQTTSRGKRNSKQRLKRLEEALKELGSDLLKEHPVDNQALQNDRLYLYYLQNGKDMYTGQELDIHNLSNYDIDHIIPQSFITDNSIDNRVLVSSKENRGKSDNVPSKEVVKKMKPFWQKLYRAGLISQRKFDNLTKAERGGLTEDDKAGFINRQLVETRQITKHVANILHQRFNTEKDEEGNTIRNVKIITLKSALTSQFRKTFGLYKVREINDYHHAHDAYLNAVVATTLLKVYPQLEPDFVYGEYRKSNLRKLIAKSAFKENKATAKKQFYSNIMEFFSSEEPIIDGTIIERPLIETNKENGEILWDKSKDIATIKKVLSYHQMNIVKKVEIQTGGFSKETIQPKGNSNKLIPRKNNWDPKKYGGFDSPNVAYSIVITYDIEKGKKKKLKRVKEIVGITIMERSAFEKNPIAYLENKGYQNPKENVLMKLPKYSLFELENGRRRLLASAKEAQKGNQMVLPAHLVTLLYHAKRYIESNFNAESLEQKQEYVNEHRHQFDELLDHVIDFSEKYTLADKNLEKIKKLYEENNEADIKELAKSFINLMTFNKMGAPADFKFFGKNIPRKRYTSIKELLNATIIYQSITGLYETRRKLGKLGED

SEQ ID NO: 196 - protein, 1368 aa, Artificial Sequence
  1368 residue - joint ancestral sequence reconstruction method - node 77
MKKEYTIGLDIGTNSVGWAVITDDYDLVRKRMKINGNTDKKKIKKNFWGVRLFDEGETAEDRRLKRTTRRRLTRRRNRISYLQEIFKDEMNKVDENFFHRLNESFYVPEDKKHDRHPIFGTLEEEVAYHKQYPTIYHLRKHLADSNEKADLRLVYLALAHIIKYRGHFLIEGELNTENSSVEETFKEFLQEYNQTFSLQPPVDEDIDVEAILTEKVSRSRKAENVLNLFPTEKSNGMFHQFLKLIVGNQGNFKKVFDLEEDAKLQFSKETYEEDLEALLANIGDEYADVFLAAKNVYDAIELSGILSTTDNNTKAKLSSSMIERYEEHKKDLAALKNFIKEHLPEKYFEIFRDSSKNGYAGYIEGKTSEEDFYKYIKKILSKIDGAESFLKKIDQENFLRKQRTYDNGVIPHQIHLEELRAIIERQGKYYPFLLENQEKIESLLTFRIPYYVGPLAKGNSRFAWIERKSDEPIRPWNFEEVVDLENSATRFIEKMTNYDTYLPNEKVLPKHSLLYQKFTVFNELTKVRYIDDRGKECENFSSKEKQEIFDNLFKKNRKVSKKDLENYLKNEYQYIDSPTIKGIENNFNASFSTYHDFLKIGVSREVLDNEDYEEMLEDIVKILTVFEDRKMIRKQLEKYSDVLDEDILKKLERRHYTGWGRLSAKLINGIRDKQTQKTILDYLIDDDALNRNFMQLINDDNLSFKKEIEKAQLKTESENLKDIVDNLPGSPAIKKGILQSLKIVDELVEIMGGYEPKNIVVEMARENQTTSQGKRNSKQRLKRIEEALKELGSDLLKEHPVDNQALQNDRLYLYYLQNGKDMYTGQELDIHNLSNYDIDHIIPQSFITDNSIDNRVLVSSKENRGKSDNVPSEEVVKKMKPFWQKLYRAGLISQRKFDNLTKAERGGLTEDDKAGFINRQLVETRQITKHVASILHQRFNTENDEEGNTIRNVKIITLKSALTSQFRKTFGLYKVREINDYHHAHDAYLNAVVATTLLKVYPQLEPDFVYGEYRKSNLRKLIAKSAFKENKATAKKQFYSNLMEFFSSEEPIIDGTIIERPLIETNKENGEILWDKSKDIATIKKVLSYHQMNIVKKVEIQTGGFSKETIQPKGNSNKLIPRKNNWDPKKYGGFDSPNVAYSIVITHDIEKGKKKKLKRVKEIVGITIMERSIFEKNPIAYLENKGYVNPKENVLMKLPKYSLFELENGRRRLLASAKEAQKGNQMVLPAHLVTLLYHAKRYIESNFNAESEEQKQEYVNEHRHQFDELLDHVINFSEKYTLADANLEKIKKLYEENNEAEIKELAKSFINLMTFNKMGAPADFKFFGKNIERKRYTSIKELLNATIIYQSITGLYETRRKLGKLGED

SEQ ID NO: 197 - protein, 1368 aa, Artificial Sequence
  1368 residue - joint ancestral sequence reconstruction method - node 78
MKKQYTIGLDIGTNSVGWAVISDDYDLIRKRMKINGDHDKGKMKKNFWGVRLFDEGETAEDRRIKRTTRRRLRRRRNRIHYLQSIFKDEMNKVDENFFHRLNESFYVPMDKEHDRHPIFGTLEEEVAYHKQFPTIYHLRKYLADSNEQADLRLVYLALAHIIKYRGHFLIEGELNTENSSVEETFKEFLHHYNQTFSLQPPISEDISVEAELTEKVSRSRKAENVLNKFGTEKSNGMFHQFLKLIVGNQGNFKKVFSLEEDRKLNISKETYEEDLEALLADIGEDYRELFLAAKNVHDAIELSGILSTTDDKTKASLSSSMIERYEEHKQDLSALKNFIKAHLPDRYFDIFRNSSKNGYAGYIEGKTSEEDFYKYLKKVLNKVDGAESFLKKIDEERFLRKQRTYDNGVIPHQIHLEELRAIIEKQGQYYPFLLENQEKIESLLTFRIPYYVGPLAKGQSKFAWIERKGDESIRPWNIEEEVDLVSSAERFIEKMTNYDTYLPNEKVLPKHSLLIQKFNVFNELTKVQYIDDQGKRCENFSSKEKQEIYDNLFKKNRTVSKKDLEDYLKNEYQYLDNPTIKGIENKFNASLKTYHDFLKIGVSREVLDNENYEERLEDIVKILTVFEDRKMIRKQLEKFSDVLDQDILKKLERRHYTGWGRLSAKLINGIRDEQTQKTILDYLIDDDAPNRNFMQLINDDDLSFKKTIEKARLKTESDNLKDIVDKIPGSPAIKKGILQSLKIVDEIVEIMGGYEPESIVVEMARENQTTSQGQRNAKERLKRIEEALKELKSDLLKKHPVDQEALQNDRLYLYYLQNGKDMYTNQELDINNLSNYDIDHIIPRSFTTDNSIDNRVLVSSKENRGKSDDVPSEEVVKNMKPFWSSLYRSNLISKRKFDNLTKAERGGLTEDDKAGFIKRQLVETRQITKHVASILHQRYNTENDEEGNTIRNVKIITLKSALTSQFRKAFDLYKVREINDYHHAHDAYLNAVVATLLLKVYPQLEPDFVYGEYRKTNLRKLIAKSAFKENKATAKKQFYSNLIERFSSEEQIIDGTIIERPLIETNKENGEIVWDKSKDIAKIKRVLSYHQMNIVKKVEIQTGNFSKETVQPKGNSNKLIPRKKDWDPKKYGGFDSPNVAYSIIFTHDIEKGKKKKLKRVKEIIGITIMDQSIFEADQIKYLENKGYVNPKENIKFKLPKYSLFELENGRRRLLASANEAQKGNQMVLPTHLVTLLYHCKRYIDSSFNADHEEQKQTYINENRHQFNELLDHVLNFSAQYTLADANEEKIKKLYEENNQAEVSELATSFINLMDFNKMGAPSAFKFFGTNIERKRYTSIKELLNATIIYQSITGLYETRKEVGKLGED

SEQ ID NO: 198 - protein, 1368 aa, Artificial Sequence
  1368 residue - joint ancestral sequence reconstruction method - node 79
MKKEYTIGLDIGTNSVGWAVLTDDYDLVKKKMKVHGNTEKKKIKKNFWGVRLFDEGETAEDRRLKRTTRRRYTRRRNRISYLQEIFQEEMNKVDENFFHRLDESFLVPEDKKHDRHPIFATLEEEVAYHEQYPTIYHLRKHLADSSEKADLRLVYLALAHIIKYRGHFLIEGELNTENTSVEETFKQFLQVYNQTFSEQEPVDETIDVEEILTEKVSRTRKAENVLKLFPNEKSNGMFAQFLKLIVGNQGNFKKVFDLEEDAKLQFSKETYEEDLEALLAKIGDEYADVFLAAKNVYDAIELSGILSTTDNNTKAKLSASMIERYEEHKKDLAQLKQFIKENLPEKYNEIFKDSSKNGYAGYIEGKTSQEDFYKYIKKILSKIDGAEYFLEKIEQENFLRKQRTFDNGVIPHQIHLEELRAIIDRQAKYYPFLKENQEKIESLLTFRIPYYVGPLAKGNSRFAWLIRKSDEPIRPWNFEEVVDLEKSATRFIERMTNYDTYLPNEKVLPKHSLLYQKFMVFNELTKVSYIDDRGKTQENFSSEEKQEIFDDLFKKNRKVTKKDLENFLRNEYNYIESATIKGIEDSFNASFSTYHDFLKIGVTQEVLDDPENEEMLEDIVKILTVFEDRKMIRKQLSKYSDVLDEEILKKLERRHYTGWGRLSAKLINGIRDKQSNKTILDYLINDDGLNRNFMQLINDDNLSFKEEIEKAQAITDTENLQEIVQDLPGSPAIKKGILQSLKIVDELVEIMGGYEPKNIVVEMARENQTTSRGKRNSKPRLKALEEALKELGSNLLKEHPTDNQALQNDRLYLYYLQNGKDMYTGQELDIHNLSNYDIDHIIPQSFITDNSIDNRVLVSSKENRGKSDDVPSKEVVKKMKPFWEKLYRAGLISQRKFDNLTKAERGGLTEDDKAGFIQRQLVETRQITKHVANILHQRFNSEKDEEGNTIRKVRIITLKSALTSQFRKTFGLYKVREINDYHHAHDAYLNGVVATTLLKVYPQLEPEFVYGEYHKFNLRKLIAKSAFKENKATAKKQFYSNIMKFFASDEPIIDGTIIERPLIETNKENGEILWDKSKNIATIKKVLSYHQMNIVKKVEIQKGGFSKETIQPKGNSNKLIPRKNNWDPKKYGGFDSPNVAYSVVITYDIEKGKKRKLKRVKEIVGITIMERSAFEKNPIAFLENKGYQNPKENVLMKLPKYTLFELENGRRRMLASAKEAQKGNQMVLPAHLVTLLYHAKHYDESNFNSESLEQKQEYVNEHRAEFSEILDHVIDFAERYTLADKNLEKIKKLYEENQEADIKELAQSFVNLMQFNAMGAPADFKFFGKTIPRKRYTSIKELLNATIIYQSITGLYETRRRLGKLGED

SEQ ID NO: 199 - protein, 1368 aa, Artificial Sequence
  1368 residue - joint ancestral sequence reconstruction method - node 80
MKKEYTIGLDIGTNSVGWAVLTDDYRLVAKKMKVHGNTEKKKIKKNFWGVRLFDEGQTAEARRSKRTTRRRLARRRNRILELQEIFAEEILKIDEHFFARLDESFLVPEDKKHTRHPIFATLEEEKSYHQQYPTIYHLRQHLADSSEKADIRLVYLALAHILKYRGHFLIEGELNTENTSVEETFKQFLQVYNQQFSEPEPVDETVDVAVILTEKLSKTKKAEKVLKYFPNEKSNGYFAQFLKLIVGNQGNFKKVFDLEEEAKLQFSKETYEEDLEELLEKIGDEYADVFLQAKNVYDAILLSEILSTTTKNTKAKLSAGMIERYEEHKKDLAQLKQFVKENLPEKYNEFFKDSSKNGYAGYIEGKTTQEDFYKFVKKELSGIDGSEPFLEKIEQENFLRKQRTFDNGVIPHQIHLTELRAIIDRQKKYYPFLKEAQEKIESLLTFRIPYYVGPLAKGQSPFAWLIRKSEEKIKPWNFEEVVDMEKSAMRFIERMTNYDTYLPNEKVLPKHSLLYQKFMIFNELTKVSYKDERGKTHEYFSSEEKREIFDELFKKNRKVTKKDLQNFLYLNYNYIENAEIKGIEKAFNASYSTYHDFLKLAEMQEWLEDPEMESMFEDIVKILTVFEDREMIRTQLSKYEAVLGEEILKKLAKKHYTGWGRLSEKLIQGIRDKQSNKTILDYLINDDGFNRNFMQLINDDNLSFKEEIEKAQAITDTENLQEIVQDLPGSPAIKKGILQSLKIVDELVEIMGGYEPKNIVVEMARENQTTSRGKRNSKPRLKALEEALKDFGSQLLKEHPTDNQALQKDRLYLYYLQNGKDMYTGEPLDIHRLSDYDIDHIIPRSFITDNSIDNKVLVSSKENRGKRDDVPSEKVVKKMRPFWEKLYRAKLISQRKFDNLTKIERGGLTEEDKAGFIQRQLVETRQITKHVANILHQRFNQKQEDEGKAIRKVRIITLKSALTSQFRKTFGIYKVREINDYHHAHDAYLNGVVAIALLKKYPQLAPEFVYGEYLKFNLRKLIAKSAHKENKATAKKEFYSNIMKFFESDEPICDGTIIERPLIETNKENGEIFWDKSKNIAQIKKVISYHQMNIVKKVEIQKGGFSKETVQPKGNSNKLIPRKNNWDPSKYGGFGSPNVAYTVAFTYDIEKGKARKLKRAKAIEGITIMERSAFEQNPIAFLKNKGYENAKENVFMKLPKYTLFELENGRRRMVASHKEAQKANSFILPEHLVTLLYHAKHYDEISFHKESFEQKQDYVNEHRSEFSEILDHVIDFAGRYTLADKNIEKIQKLYEENQEADIAELAQSFVNLMQFNAMGAPADFKFFDVTIPRKRYTSLTEIWDATIIYQSITGLYETRIRMGKLGEQ

SEQ ID NO: 200 - protein, 1368 aa, Artificial Sequence
  1368 residue - joint ancestral sequence reconstruction method - node 81
MKKEYTIGLDIGTNSVGWAVLTDDYRLVAKKMSVHGNTEKKKIKKNFWGARLFDEGQTAEARRSKRTTRRRLARRRNRILELQEIFAEEILKIDEHFFARLDESFLVPEDKKYTRFPIFATLEEEKSYHQQYPTIYHLRQHLADSTEKADIRLVYLALAHILKYRGHFLFEGELDTENTSVEETFKQFLQVYNQQFSEPEPVDETEGVAVILTEKLSKTKKVEKVLKYYPNEKSNGYFAQFLKLIVGNQGNFKKVFDLEEEAKLQFSKETYEEDLEELLEKIGDEYADVFLQAKNVYDAILLSEILSTTTKNTKAKLSAGMIERYEEHKKDLAKLKQFVKENLPEKYNEFFKDSSKNGYAGYIEGKTTQEDFYKFVKKELSGIDGSEPFLEKIDQENFLLKQRTFANGVIPHQIHLTELRAIIDRQKKYYPFLKEAQEKIESLLTFRIPYYVGPLAKGQSPFAWLERKSAEKITPWNFEEVVDMEKSAMRFIERMTNYDTYLPNEKVLPKHSLLYQKFMIFNELTKVSYKDERGKTHEYFSSEEKREIFDELFKKHRKVTKKKLQNFLYLNYNYIENAEIKGIEKAFNASYSTYHDFLKLAEMQEWLEDPEMESMFEDIVKILTIFEDREMIRTQLSKYEAVLGEEILKKLAKKHYTGWGRLSEKLIQGIRDKQSNKTILDYLINDDDFNRNFMQLINDDHLSFKEEIAKALAISDTQSLLEVVQDLPGSPAIKKGIWQSLKIVEELVEIIGGYNPKNIVVEMARENQKTSRGKRNSKPRLKALEEALKNFGSPLLKEHPTDNQALQKDRLYLYYLQNGKDMYTGEPLDIHRLSEYDIDHIIPRSFIVDNSIDNKVLVSSKENRGKRDDVPSEKVVKKMRPFWEKLQRAKLISQRKFANLTKIERGGLTEEDKARFIQRQLVETRQITKHVANILHQHFNQKQEDEGKASGKVRIITLKSTLTSQFRKTFGIYKVREINNHHHAHDAYLNGVVAIALLKKYPKLAPEFVYGNYIKFNLRKLIAKSLHKENKATAKKEFYSNIMKFFESDEPSCDGTIIERPLIETNKENGEIFWDKSRNIAQIKKVISSHQVNIVKKVEIQKGGFYKETVNPKGNPDKLIPRKNNWDPSKYGGFGSPVVAYTVAFIYDIEKGKARKLKRAKAIEGITIMEQSAFEQDPIAFLKNKGYENVKENEFMKLPKYTLFELENGRRRMVASHKEAQKANSFILPEHLVTLLYHAKHYDEISFHKESFEQKQDYVNEHRSEFSEILDHVIDFAGRYTLADKNIEKIQKLYEENQEADIAELAQSFVNLMQFNAMGAPADFKFFDVTIPRKRYTSLTEIWDATIIYQSITGLYETRIRMGNLGEQ

SEQ ID NO: 201 - protein, 1368 aa, Artificial Sequence
  1368 residue - joint ancestral sequence reconstruction method - node 82
MTKDYTIGLDIGTNSVGWAVLTDDYRLMAKKMSVHGNTEKKKIKKNFWGARLFDEGQTAEARRSKRTTRRRLARRRNRILELQEIFAEEILKIDEHFFVRLDESFLVPEDKQYTRFPIFPTLEEEKSYYQQYPTIYHLRQKLADSTEKADIRLVYLALAHILKYRGHFLFEGELDTENTSVEETFKQFLEVYNQQFDQPEAVDETEGVAVILTEKLSKTKKVEKILKYYPTEKTNGYFAQFLKLIVGNQGNFKKVFDLEEEAKLQFSKETYEEDLESLLEKIGDEYADVFLQAKKVYDAILLSEILSTTTKNTKAKLSAGMIERYEEHKKDLAKLKQFVKENLPEKTTVFFKDSSKNGYAGYIEGKTTQEDFYKFVKKELSGIVGSEPFLEKIDQENFLLKQRTFANGVIPHQVHLTELKAIIDRQKQYYPFLEEAREKIISLLTFRIPYYVGPLAKGQSSFAWLERKTAEKITPWNFTEVVDMEKSAMRFIQRMTNYDTYLPTEKVLPKHSLLYQKYMIFNELTKVSYKDERGIKHEYFSSEEKREIFKELFQKQRKVTVKKLQNFLYANYNYIENAEILGIEKAFNASYSTYHDFLKLAKMQEWLEQPEMESMFEDIVKILTIFEDREMIRTQLSKYQAVLGEEILKKLAKKHYTGWGRLSEKLIHGIRDKKTNKTILDYLINDDDFNRNFMQLINDDHLSFKEEIAKALALSDNQSLLEVVQDLPGSPAIKKGIWQSLKIVEELIEIIGGYNPKNIVVEMARENQKTNRGKRNSKPRLKALEEALKNFGSPLLKEQPTDNQALQKDRLYLYYLQNGKDMYTGEPLDIDRLSEYDIDHIIPRSFIVDNSIDNKVLVSSKENRGKRDDVPSEKVVKKMRPFWEKLQRAKLISQRKFAYLTKIERGGLTPEDKARFIQRQLVETRQITKHVANILHQHFNQKQEDEGKASGKVRIITLKSTLTSQFRKTFGIYKVREINNHHHAHDAYLNGVVAIALLKKYPKLAPEFVYGNYIKFNLRKLIAKSLAKENKATAKKEFYSNILKFFESDEPSCDGTIIERPLIETNKENGEIFWDKSRHIPQIKKVISSHQVNIVKKVEIQKGGFYKETVNPKGKPDKLIQRKNNWDVSKYGGFGSPVVAYAVAFIYDIEKGKARKLKKAKAIEGITIMEQSAFEQDPIAFLKNKGYSNVTENEFIKLPKYTLFELENGRRRMVASHKEAQKANSFILPEQLVTLLYHAQHYDEISFHKESFEQKQDYVNEHLSEFSEILDQVIDFAGRYTLADKNIEKIQELYEENQEADTAELAQSFVNLMQFNAMGAPADFKFFDVTIPRKRYTSLTEIWDATIIYQSITGLYETRIRMGNLGEQ

SEQ ID NO: 202 - protein, 1368 aa, Artificial Sequence
  1368 residue - joint ancestral sequence reconstruction method - node 83
MKKEYTIGLDIGTNSVGWAVLTDDYDLVKKKMKVHGNTEKKKIKKNFWGVRLFDEGETAEDRRLKRTTRRRYTRRRNRISYLQEIFQEEMNKVDENFFHRLDESFLVPEDKKHDRHPIFATLEEEVAYHEQYPTIYHLRKHLADSSEKADLRLVYLALAHIIKYRGHFLIEGKLNTENTSVEETFKQFLQVYNQTFSEQEPVDETIDVEEILTEKVSRTRKAENVLKLFPNEKSNGMFAQFLKLIVGNQGNFKKVFDLEEDAKLQFSKETYEEDLEALLAKIGDEYADVFLAAKNVYDAVELSGILTVTDNNTKAKLSASMIERYEEHKKDLKQLKQFIRENLPEKYNEIFKDSSKNGYAGYIEGKTSQEDFYKYIKKILEKIDGAEYFLEKIEQENFLRKQRTFDNGVIPHQIHLEELRAIIHRQAKYYPFLKENQEKIESLLTFRIPYYVGPLANGNSRFAWLTRKSDEPIRPWNLEEVVDLGKSATAFIERMTNYDTYLPNEKVLPKHSLLYQKYMVFNELTKVSYIDDRGKTQENFSSEEKQQIFDDLFKQNRKVTKKDLENFLRNEYNYIESATIKGIEDSFNASFSTYHDFLKIGVTQEVLDDPENEEMLEDIVKILTVFEDRKMIREQLSKYSDVLDEEVLKKLERRHYTGWGRLSAKLINGIRDKQSNKTILDYLINDDGLNRNFMQLINDDNLSFKEEIEKAQASTNTEDLQEIVQDLAGSPAIKKGILQSLKIVDELVEIMGGYPPKNIVVEMARENQTTSRGKRNSKPRLKALEEAMKELGSNLLKEHPTDNQALQNDRLYLYYLQNGKDMYTGQELDIHNLSNYDIDHIIPQSFITDNSIDNRVLVSSTENRGKSDDVPSKEVVKKMKAFWEKLYRAGLISQRKFDNLTKAERGGLTEDDKAHFIQRQLVETRQITKHVANILHQRFNSEKDEEGNTIRKVRIITLKSALTSQFRKTFGLYKVREINDYHHAHDAYLNGVVATTLLKVYPQLEPEFVYGEYHKFNLRKLIAKSAFKENKATAKKQFYSNIMKFFASDEPIIDGTIIERPLIETNKENGEILWDKSKNIATIKKVLSYHQMNIVKKVEIQKGGFSKETIQPKGNSNKLIPRKNNWDPKKYGGFDSPNVAYSVVITYDIEKGKKRKLKRVKEIVGITIMERSAFEKNPIAFLENKGYQNPKENVLMKLPKYTLYELENGRRRMLASAKEAQKGNQMVLPAHLVTLLYHAKHCDESNFNSESLEQKQEYVNEHRAEFSEILDHVIDFAERYTLADKNLEKIKKLYEENQEADIKEIAQSFVNLMQFNAMGAPADFKFFGKTIPRKRYTSIKELLNATIIYQSITGLYETRRRLGDLGED

SEQ ID NO: 203 - protein, 1368 aa, Artificial Sequence
  1368 residue - joint ancestral sequence reconstruction method - node 84
MKKEYTIGLDIGTNSVGWAVLTEDYDLVKKKMKVHGNTEKKKIKKNFWGVRLFDEGETAEDRRLKRTTRRRYTRRRNRISYLQEIFQEEMNKVDENFFHRLDESFLVPEDKKHERHPIFATLEEEVAYHEQYPTIYHLRKHLADSSEKADLRLVYLALAHIIKYRGHFLIEGKLNTENTSVEETFKTFLQVYNQTFSEQEPVDETIDVEEIFTEKVSRARKAENVLKLFPNEKSNGTFAQFLKLIVGNQGNFKKTFDLEEDAKLQFSKEEYEEDLEALLAKIGDEYADVFAAAKNVYDAVELSGILTVTDNNTKAKLSASMIERYEEHKKDLKQLKQFIRKNLPEKYNEIFKDSSKNGYAGYIENSTSQEDFYKYIKKILEKIDGAEYFLEKIEQENFLRKQRTFDNGVIPHQIHLEELRAIIHRQAKYYPFLKENQEKIESLLTFRIPYYVGPLANGNSRFAWLSRKSDEPIRPWNLAEVVDLGKSATAFIERMTNYDTYLPNEKVLPKHSMLYEKYMVFNELTKVSYIDDRGKTQENFSSEEKQQIFDDLFKQNRKVTKKDLENFLRNEYNYIESATIKGIENSFNASFSTYHDFLKIGVTQEVLDDPENEEMLEEIVKILTVFEDRKMIREQLSKYSDVLDEEVLKKLERRHYTGWGRLSAKLINGIRDKQSNKTILDYLINDDGLNRNFMQLINDDNLSFKEEIEKAQAETNTEDLHEIVQDLAGSPAIKKGILQSLKIVDELVEIMGGYPPKNIVVEMARENQTTSRGRRNSKPRLKALEEAMKELGSNLLKEHPTDNQALQNDRLYLYYLQNGKDMYTGQELDIHNLSNYDIDHIIPQSFITDNSIDNRVLVSSTENRGKSDDVPSKEVVKKMKAFWEKLYRSGLISQRKFDNLTKAERGGLTEDDKAHFIQRQLVETRQITKHVARILHQRFNSEKDEEGNTIRKVRIITLKSALTSQFRKTFGLYKVREINDYHHAHDAYLNGVVATTLLKVYPQLEPEFVYGEYHKFNLRKLIAKSAFKENKATAKKQFYSNIMKFFASDEPIIDGTIIERPLIETNKENGEILWDKSKNIATVKKVMSYHQMNIVKKVEIQKGGFSKETIQPKGDSDKLISRKNNWDPKKYGGFDSPNVAYSVVITYDIEKGKKRKLKRVKEIVGITIMERSAFEKNPIEFLENKGYQNPKENVLMKLPKYTLYELENGRRRLLASAKEAQKGNQMVLPAHLVTLLYHAKHCDESNFNSESLEQKQEYVNEHRAEFSEILDHVKDFAERYTLADKNLEKILKLYEENQEADIKEIAQSFVNLMQFNAMGAPADFKFFGKTIPRKRYTSIKELLNATIINQSITGLYETRRRLGDLGED

SEQ ID NO: 204 - protein, 1368 aa, Artificial Sequence
  1368 residue - joint ancestral sequence reconstruction method - node 85
MKKEYTIGLDIGTNSVGWAVLTENYDLVKKKMKVHGNTEKKKIKKNFWGVRLFDEGETAEDRRLKRTTRRRYTRRRNRISYLQEIFQEEMNKVDENFFHRLDESFLVPEEKKHERHPIFATLEEEVAYHEQFPTIYHLRKHLADSSEKADLRLVYLALAHIIKYRGHFLIEGKLNTENSSVEETFKTFLQVYNQTFSEQEPVDETIDVEELFTEKVSRARKAENVLKLFPNEKSNGTFAQFLKLIVGNQGNFKKTFDLEEDAKLQFSKEEYEEELEALLAIIGDEYADVFAAAKNVYDAVELSGILTVTDNNTKAKLSASMIERYEEHKKDLKQLKQFIRKELPEKYNEIFRDSSKNGYAGYIENSVSQADFYKYIKKILEKIPGAEYFLEKIEQENFLRKQRTFDNGVIPHQIHLEELRAIIHKQAKYYPFLKENQEKIEQLLTFRIPYYVGPLADGNSRFAWLSRKSDEPIRPWNLAEVVDLGKSATAFIERMTNYDTYLPNEKVLPKHSMLYEKYMVFNELTKVSYIDDRGKTQENFSSEEKKQIFDELFKQNRKVTKKLLENFLRNEYNYIESATIKGIENSFNASYGTYHDFLKIGVTQEVLDDPENEEMLEEIVKILTVFEDRKMIREQLSKYSDVFDEEVLKKLERRHYTGWGRLSAKLINGIRDKQSNKTILDYLINDDGLNRNLMQLINDDNLSFKEEIAKAQAETNTEDLHEIVQDLAGSPAIKKGILQSLKIVDELVEIMGGYPPKNIVVEMARENQTTSRGRRNSKPRLKALEEAMKELGSNLLKEYPTDNQALQNDRLYLYYLQNGKDMYTGQELDIHNLSNYDIDHIIPQSFITDNSIDNRVLVSSTENRGKSDDVPSKEVVKKMIAFWEKLKRSGLISQRKFDNLTKALRGGLTEDDKAHFIQRQLVETRQITKHVARILHQRFNSEKDEEGNTIRTVRIITLKSALTSQFRKTFGLYKVREINDYHHAHDAYLNGVVATTLLKVYPQLEPEFVYGDYHKFNLRKLIAKSAFKENKATAKKQFYSNIMKFFASDEPIIDGTIIERPLIETNKENGEILWDKSKNIATVKKVMSYHQMNIVKKVEIQTGGFSKETIQPKGDSDKLISRKTNWDPKKYGGFDSPNVAYSVVITYDIEKGKKRKLKRVKEIVGITIMERSAFEKNPVEFLENKGYQNPKENVLMKLPKYTLYELENGRRRLLASAKEAQKGNQMVLPAHLVTLLYHAKHCDESNFNGKSLEQKQEYVNEHRAEFSEILDYVKDFAERYTLADKNLEKILKLYEENQEADIKEIAQSFVNLMQFNAMGAPADFKFFGKTIPRKRYTSIKELLNATIINQSITGLYETRRRLGDLGED

SEQ ID NO: 205 - protein, 1368 aa, Artificial Sequence
  1368 residue - joint ancestral sequence reconstruction method - node 86
MNKEYTIGLDIGTNSVGWAVLDENYDLVKKKMKIQGNGDKKKVKKNFWGVRLFDAGETAEGTRMKRTTRRRYTRRRNRISYLQEIFQGEMDKVDENFFHRLDDSFLVPEEKRNERHPIFATLEEEVAYHEQFPTIYHLRKHLADSTEKADLRLVYLALAHIIKYRGNFLIEGKLNTENSSVKETFKTFLQAYNQAFTVQEPVNETIDVGSLFQERVSRQRKAENVLKLFPNEKSNGTFMQFLKLIVGNQGNFKKTFGLEEDAKLQFSKEEYEEELEGLLAIVGDEYADVFAAAKNVYDAVELSGILTVKDINTKAKLSASLIKRYEEHKTDLEQLKKFVRKELPEKYYEVFRDSTKNGYAGYIENSVSQADFYKYLKKILEKIPGAEYFLEKIEQEDFLRKQRTFDNGVIPHQIHLEELRAIIRKQSRYYPFLKENQEKIEQILTFRIPYYVGPLADGNSRFAWLSRKTDGSIRPWNFTEVVDEGKSATAFIERMTNYDSYLPQEKVLPKHSMLYEKYMVFNELTKVSYIDDRGETQENFSSVEKKEIFDELFKKNRKVTYALLENFLKNQYMYIETAEIKGIEKSFNASYGTYHDLLKIGVSQEMLDDPENEEMFEEIVKILTVFEDRKMIKEQLSKYADYFEAGVLKKLVRRHYTGWGRLSAKLINGIRDKQSKKTILDYLMRDDDLNRNLMQLINDDNLSFKESIAQQQAEDQTEDLHEIVKELAGSPAIKKGILQSLKIVDEIVEIMGGYPPTNIVVEMARENQTTSRGRKKSKPRQKVLEEAMKEFGSNLLKEYPPDNANLRNDRLFLYYLQNGKDMYTGKELDIHNLSNYDIDHIIPQSFIKDNSIDNMVLVSSTENRGKSDDVPSKEVVKKMIGFWEKLKRSGLISQRKFDNLTKALNGGLTEADKAHFIQRQLVETRQITKHVARILHQKYNSEDEDEGNTIRTTRIITLKSALTSQFRQIYQLYKVREINDYHHAHDAYLNGVVATTLLKVYPRLEPEFVYGDYQKFNLRKLIAKSLFKENKATAKKNFYSNLMRFFASDQPKVDGTIIERPLIETNKENGEILWDQSKNIAMVKKVMSYHQMNIVKKTEIQTGGFSKESIQPKGDSAKLIARKTGWDPKKYGGFDSPNIAYSVVITYDIEKGKKRKLKRVKEIVGITIMERRQFEKNEVEFLENKGYQNPRENVLVKLPKYTLYELENGRRRLIASATEAQKGNQMVLPNHLVELLYHAKHCDDLNFDGKSLEQKQAYLNAHRAEFNELFEYVKHFAERYTLADKNLKKLSKLYEQNQEADIKVMAQSFLNLMQFNAMGAPADFKFFDTTIPRKRYTSIKEILNATIINQSITGLYETHWKLGELGED

SEQ ID NO: 206 - protein, 1368 aa, Artificial Sequence
  1368 residue - joint ancestral sequence reconstruction method - node 87
MKKEYTIGLDIGTNSVGWAVLTDDYDLVKKKMKVHGNTEKKKIKKNFWGVRLFDEGETAEDRRLKRTTRRRITRRRNRISYLQEIFQEEMNKVDENFFHRLDESFLVPEDKKHDRHPIFATLEEEVAYHEQYPTIYHLRKKLADSSEKADLRLVYLALAHIIKYRGHFLIEGKLNTENTSVEETFKQFLQVYNQTFANGEPLDETIDVEEILTEKVSRTRKAEKVLKLFPNEKSNGMFAQFLKLIVGNKGNFKKVFDLEEDAKIQFAKESYEEDLEALLAKIGDEYADVFLAAKNVYDAVELSSILTVTDNNTKAKLSASMIERFEEHKKDLKQLKQFIRENLPEKYNEIFKDSQKDGYAGYIEGKTSQEDFYKYIKKILENIDGAEYFLEKIEQENFLRKQRTFDNGVIPHQIHLEELQAIIHRQAKYYPFLKENQEKIESLVTFRIPYYVGPLANGNSRFAWLTRKSDEPIRPWNLEEVVDLGKSATAFIERMTNYDTYLPNEKVLPKHSLLYQKYMVFNELTKVSYIDDRGKTQENFSGEEKQQIFDDLFKQKRKVKKKDLEQFLRNEYNYIESATIKGIEDSFNASFSTYHDLLKIGVTQEVLDDPENAEMLEDIVKILTVFEDRKMIREQLSKFSDVLDEEVLKKLERRHYTGWGRLSAKLINGIRDKQSNKTILDYLINDDGLNRNFMQLINDSNLSFKNEIEKAQASTNDEDLQEIVQDLAGSPAIKKGILQSLKIVDELVEIMGGYPPKNIVVEMARENQTTSRGKRNSKPRLKALEKAMKELGSNLLKEHPTDNQALRNDRLYLYYLQNGKDMYTGQELDIHNLSNYDIDHIIPQSFITDNSIDNRVLVSSTENRGKSDDVPSKEVVKKMKAFWEKLYRAGLISQRKFDNLTKAERGGLTEDDKAHFIQRQLVETRQITKNVANILHQRFNSEKDEEGNTIRKVRIITLKSALTSQFRKTFGLYKVREVNDYHHAHDAYLNGVVATTLLKVYPQLEPEFVYGEYHKFNLRKLIAKSAFKENKATAKKQFYTNIMKFFAKDEPIIDGTIIERPLIETNKENGEILWDKSKYLATIKKVLSYHQMNIVKKVEIQKGGFSKETIKPKGNSNKLIPRKNNWDPKKYGGFDSPNVAYSVVITYDIEKGKKRKLKRVKEIVGITIMERTAFEKNPIAFLEEKGYQNPKENVLMKLPKYTLYELENGRRRMLASAKEAQKGNQMVLPAHLVTLLYHAKHCDESNFNSESLEQKQAYVEEHRAEFSEILDHVIDFAERYTLADANLEKIKKLFEENQEADIKEIAQSFVNLMQFNAMGAPASFKFFEKTIERKRYTSIKELLNATIIYQSITGLYETRRRLGDLGED

SEQ ID NO: 207 - protein, 1368 aa, Artificial Sequence
  1368 residue - joint ancestral sequence reconstruction method - node 88
MKKPYTIGLDIGTNSVGWAVLTDQYDLVKRKMKVAGNSEKKQIKKNFWGVRLFDEGETAADRRMNRTTRRRIERRRNRISYLQEIFAEEMSKVDANFFYRLDDSFYVESEKRHSRHPFFATIEEEVAYHENYRTIYHLREKLVNSSEKADLRLVYLALAHIIKYRGNFLIEGKLDTKNTSVDEVFKQFIQTYNQVFASGIRLEENKDVAKILSEKVTRKEKLEKILKLYPGEKSTGMFAQFISLIVGSKGNFKKVFDLDEKTDIECAKDSYEEDLEALLAKIGDEYAEIFVAAKNAYNAVVLSSIITVTDTETKAKLSASMIERFDKHEKDLKQLKAFIKVHLPEKYNEIFNDVEKDGYAGYIDGKTKQEDFYKYMKKMLENIEGADYFIDKIEEENFLRKQRTFDNGAIPHQLHLEELEAILHQQAKYYPFLKENYEKIKSLVTFRIPYFVGPLANGQSEFAWLTRKADGEIRPWNIEEKVDFGKSAIDFIEKMTNKDTYLPKENVLPKHSLCYQKYMVYNELTKVRYIDDQGKTHEYFSGQEKQQIFNDLFKQKRKVKKKDLEQFLRNMSNHIESPTIEGVEDSFNSSFATYHDLLKVGVTQEILDNPLNAEMLEDIVKILTVFEDKRMIKEQLQQFSDVLDGAVLKKLERRHYTGWGRLSAKLLIGIRDKQSHLTILDYLMNDDGLNRNLMQLINDSNLSFKSIIEKEQVSTADKDIQSIVADLAGSPAIKKGILQSLKIVDELVGIMGGYPPQTIVVEMARENQTTGKGKNNSKPRFKSLEKAIKEFGSQILKEHPTDNQGLRNDRLYLYYLQNGKDMYTGQELDIHNLSNYDIDHIVPQSFITDNSIDNRVLVSSAANREKGDDVPSLEVVRKRKVFWEKLYQANLMSKRKFDYLTKAERGGLTEADKARFIHRQLVETRQITKNVANILHQRFNCEKDENGNTIEQVRIVTLKSALVSQFRKQFQLYKVREVNDYHHAHDAYLNGVVANTLLKVYPQLEPEFVYGDYHQFDLRKLIAKSWFKANKATAKKQFYTNIMLFFAKKDRIIDGTIIERPLIETNKENGEILWDKSKYLDTIKKVLSYRQMNIVKKTEIQKGEFSKATIKPKGNSSKLIPRKANWDPMKYGGFDSPNMAYAVVIEYDIEKGKKKKLIKEKEIIRITIMERTAFEKDQKAFLEEKGYRNPKENVLTKLPKYTLYECENGRRRMLASANEAQKGNQMVLPNHLVTLLYHAKNCEASNFDGKSLEQKQAYIESHREMFAELLAHVSEFAKRYTLADANLEKINQLFEQNKEGDIKVIAQSFVNLMAFNAMGAPASFKFFETTIERKRYNNLKELLNATIIYQSITGLYEARKRLDDLGED

SEQ ID NO: 208 - protein, 1368 aa, Artificial Sequence
  1368 residue - joint ancestral sequence reconstruction method - node 89
MKKPYTIGLDIGTNSVGWAVLTDQYDLVKRKMKVAGNSEKKQIKKNFWGVRLFDEGETAADRRMNRTARRRIERRRNRISYLQEIFAEEMSKIDANFFCRLNDSFYVDSEKRNSRHPFFATIEEEVAYHKNYRTIYHLREELVNSSEKADLRLVYLALAHIIKYRGNFLIEGALDTKNTSVDGVYKQFIQTYNQVFASGIKLEENKDVAKILAEKVTRKEKLERILKLYPGEKSTGMFAQFISLIVGSKGNFQKVFDLVEKTDIECAKDSYEEDLEALLAIIGDEYAELFVAAKNAYNAVVLSSIITVTDTETNAKLSASMIERFDTHEKDLSELKAFIKLHLPKQYEEIFSNVEKDGYAGYIDGKTKQADFYKYMKTMLENIEGADYFIAKIEEENFLRKQRTFDNGAIPHQLHLEELEAILHQQAKYYPFLKENYDKIKSLVTFRIPYFVGPLANGQSEFAWLTRKADGEIRPWNIEEKVDFGKSAVDFIEKMTNKDTYLPKENVLPKHSLCYQKYMVYNELTKVRYIDDQGKTNEYFSGQEKQQIFNDLFKQKRKVKKKDLEQFLRNMSHHIESPTIEGLEDSFNSSYATYHDLLKVGIKQEILDNPLNTEMLEDIVKILTVFEDKRMIKEQLQQFSDVLDGAVLKKLERRHYTGWGRLSAKLLIGIRDKQSHLTILDYLMNDDGLNRNLMQLINDSNLSFKSIIEKEQVSTADKDIQSIVADLAGSPAIKKGILQSLKIVDELVSIMGGYPPQTIVVEMARENQTTGKGKNNSRPRYKSLEKAIKEFGSQILKEHPTDNQELRNNRLYLYYLQNGKDMYTGQELDIHNLSNYDIDHIVPQSFITDNSIDNLVLTSSAGNREKGDDVPPLEIVRKRKVFWEKLYQGNLMSKRKFDYLTKAERGGLTEADKARFIHRQLVETRQITKNVANILHQRFNYEKDDHGNTMEQVRIVTLKSALVSQFRKQFQLYKVREVNDYHHAHDAYLNGVVANTLLKVYPQLEPEFVYGDYHQFDLRKLIAKSWFKANKATAKKQFYTNIMLFFAQKDRIIDGTIIERPLIETNKENGEILWDKSKYLDTIKKVLSYRQMNIVKKTEIQKGEFSKATIKPKGNSSKLIPRKANWDPMKYGGLDSPNMAYAVVIEYDIAKGKKKKLVFEKKIIRITIMERKAFEKDEKAFLEEQGYRQPKENVLTKLPKYTLYECENGRRRMLASANEAQKGNQQVLPNHLVTLLHHAKNCEASNFDGKSLEQKQDYIESNREMFAELLAHVSEFAKRYTLADANLNKINQLFEQNKEGDIKVIAQSFVNLMAFNAMGAPASFKFFETTIERKRYNNLKELLNATIIYQSITGLYEARKRLDDLGED

SEQ ID NO: 209 - protein, 1368 aa, Artificial Sequence
  1368 residue - joint ancestral sequence reconstruction method - node 90
MKKPYTIGLDIGTNSVGWAVLTDQYDLVKRKMKVAGNSEKKQIKKNFWGVRLFDEGETAADRRMNRTTRRRIERRRNRISYLQEIFAAEMSEVDANFFYRLEDSFYIESEKRHSRHPFFATIEEEVAYHENYRTIYHLREKLVNSSDKADLRLVYLALAHIIKYRGNFLIEGKLDTKNTSVDEVFKQFIQTYNQVFASDIRLEENKEVAKILSEKLTRREKLDKILKLYPGEKSTGMFAQFISLIIGSKGNFKKVFDLDEKTDIECAKDSYEEDLEALLAKIGDEYAEIFVAAKNAYNAVVLSSIITVTDTETKAKLSASMIERFDKHEKDLKRLKAFFKVHLPEKFNEVFNDVEKDGYAGYIDGKTKQEDFYKYMKKMLENIEGADYFIDQIEEENFLRKQRTFDNGAIPHQLHLEELEAILHQQAKYYPFLKEDYEKIKSLVTFRIPYFVGPLANGQSEFAWLTRKADGEIRPWNIEEKVDFGKSAIDFIEKMTNKDTYLPKENVLPKHSLCYQKYMVYNELTKIRYIDDQGKTHEYFSGQEKQQIFNDLFKQKRKVKKKDLEQFLYNMMNHIESPTIEGVEDAFNSSFATYHDLQKVGVTQEILDNPLNAEMLEEIVKILTVFEDKRMIKEQLQQFSDVLDGAVLKKLERRHYTGWGRLSAKLLIGIRDKQSHLTILDYLMNDDGLNRNLMQLINDSNLSFKSIIEKEQVSTADKDIQSIVADLAGSPAIKKGILQSLKIVDELVGIMGGYPPQTIVVEMARENQTTGKGKNNSKPRFTSLEKAIKEFGSQILKEHPTDNQGLKNDRLYLYYLQNGKDMYTGQELDIHNLSNYDIDHIVPQSFITDNSIDNRVLVSSAANREKGDNVPSLEVVRKRKVFWEKLYQAKLMSKRKFDYLTKAERGGLTEADKARFIHRQLVETRQITKNVANILHQRFNCKKDENGNTIEQVRIVTLKSALVSQFRKQFQLYKVREVNDYHHAHDAYLNGVVANTLLKVYPQLEPEFVYGDYHQFDLRKLIAKSWFKANKATAKKQFYTNIMLFFAKKDRIIDGTIIERPLIETNKENGEILWDKSKYLDTIKKVLSYRQMNIVKKTEIQKGEFSNATVNPKGNSSKLIPRKADWDPIKYGGFDGSNMAYAIVIEYDIEKRKKKTVIKEKELIQINIMERTAFEKDQKAFLEEKGYRNPKENVLTKIPKYTLYECENGRRRMLGSANEAQKGNQMVLPNHLMTLLYHAKNCEASNFDGKSLEQKQAYIESHREMFAELLAHISEFAKRYTLADANLEKINTLFEQNKEGDIKVIAQSFVNLMAFNAMGAPASFKFFETTIERKRYNNLKELLNATIIYQSITGLYEARKRLDDLGED

SEQ ID NO: 210 - protein, 1368 aa, Artificial Sequence
  1368 residue - joint ancestral sequence reconstruction method - node 91
MKKPYSIGLDIGTNSVGWAVITDDYKVPAKKMKVLGNTDKQSIKKNLLGALLFDSGETAEDTRLKRTARRRYTRRRNRICYLQEIFSEEMNKVDDSFFHRLDESFLVPEDKKHDRHPIFGNLAEEVAYHEQYPTIYHLRKHLADSSEKADLRLVYLALAHIIKFRGHFLIEGDLNAENTDVQKLFQQFVEVYNQTFEESHLSEETIDVEEILTEKISKSRRLENLIKHFPNEKKNGLFGNLLALILGLQPNFKTNFDLSEDAKLQFSKDTYEEDLENLLAQIGDEYADLFLAAKNLYDAILLSGILTVTDNNTKAPLSASMIKRYEEHQKDLAQLKQFIKEHLPEKYNEIFSDKSKNGYAGYIDGKTSQEDFYKYLKNILSKIDGAEYFLDKIDREDFLRKQRTFDNGSIPHQIHLEELHAILRRQGEYYPFLKENQEKIEKILTFRIPYYVGPLARGNSRFAWLTRKSDEAITPWNFDEVVDKEKSAEAFIERMTNYDTYLPNEKVLPKHSLLYETFTVYNELTKVKYVTERGKTREFFSAEQKQEIFDHLFKKNRKVTKKKLKDYLKKEFEEFDSVDITGIEDEFNASLGTYHDLLKILKDKDFLDDEENEDILEDIVLTLTLFEDREMIRKRLEKYSDIFTKEQLKKLERRHYTGWGRLSAKLINGIRDKQSGKTILDYLIDDGSSNRNFMQLINDDSLSFKEEIQKAQVIGETDNLKEVVQDLAGSPAIKKGILQSLKIVDELVKVMGGHNPENIVVEMARENQTTNQGRRNSQQRLKRLEEALKNLGSNILKEHPVDNQQLQNDRLYLYYLQNGKDMYTGQELDIDNLSQYDIDHIIPQSFIKDNSIDNRVLTSSEENRGKSDNVPSIEVVRKMKSFWQKLLNAGLISQRKFDNLTKAERGGLTEDDKAGFIKRQLVETRQITKHVAQILDARFNTERDENDKRIRNVKIITLKSNLVSQFRKDFGLYKVREINDYHHAHDAYLNAVVGTALLKKYPKLEPEFVYGDYKKYNLRKLIAKSDRERGKATAKMFFYSNIMNFFKTEVKLADGTIIERPLIETNKETGEIVWDKEKDFATVRKVLSYPQVNIVKKVEVQTGGFSKESILPKGNSDKLIPRKNNWDPKKYGGFDSPTVAYSVLVVADIEKGKAKKLKTVKELVGITIMERSAFEKNPIAFLEKKGYQNIQENLIIKLPKYSLFELENGRRRLLASAKELQKGNEMVLPAHLVTLLYHAKRIDKSNGNSENLEQKQEYVEKHRNEFDELLDYIIDFSEKYILADKNLEKIKELYEENDDADINELASSFINLLTFTALGAPAAFKFFGENIDRKRYTSTKEVLNATLIHQSITGLYETRIDLSKLGED

SEQ ID NO: 211 - protein, 1368 aa, Artificial Sequence
  1368 residue - joint ancestral sequence reconstruction method - node 92
MKKPYSIGLDIGTNSVGWAVITDDYKVPAKKMKVLGNTDRQSIKKNLIGALLFDSGETAEATRLKRTARRRYTRRKNRICYLQEIFSNEMAKVDDSFFHRLEESFLVPEDKKHDRHPIFGNLADEVAYHENYPTIYHLRKKLADSSEKADLRLIYLALAHIIKFRGHFLIEGDLNAENTDVQKLFHQLVDTYNQLFEEDPLDTETIDAKAILTAKISKSRRLENLISQIPGQKKNGLFGNLIALSLGLTPNFKTNFDLSEDAKLQLSKDTYEEDLDNLLAQIGDQYADLFLAAKNLSDAILLSDILTVSDENTKAPLSASMIKRYEEHQQDLALLKQLVKEQLPEKYKEIFSDKSKNGYAGYIDGKTSQEDFYKYIKPILSKLDGAEEFLAKIDREDFLRKQRTFDNGSIPHQIHLEELHAILRRQEEYYPFLKDNQEKIEKILTFRIPYYVGPLARGNSRFAWLTRKSDEAITPWNFEEVVDKEASAQAFIERMTNFDTYLPNEKVLPKHSLLYETFTVYNELTKVKYVTEGMTKPEFLSAEQKQAIVDLLFKKNRKVTVKQLKENYFKKIECFDSVDITGVEDRFNASLGTYHDLLKIIKDKDFLDNEENEDILEDIVLTLTLFEDREMIEKRLAKYADLFDKNVLKKLKRRHYTGWGRLSRKLINGIRDKQSGKTILDFLKADGFANRNFMQLINDDSLSFKEEIQKAQVIGQTDSLKEVVADLAGSPAIKKGILQTIKIVDELVKVMGGHNPENIVIEMARENQTTNQGIKNSRQRMKRLEEVLKKLGSNILKEHPVDNTQLQNDRLYLYYLQNGKDMYTGQELDIDNLSQYDIDHIIPQSFIKDNSIDNKVLTSSEENRGKSDNVPSIEVVRKMKSYWQKLLNAGLISQRKFDNLTKAERGGLSESDKAGFIKRQLVETRQITKHVAQILDSRFNTERDENDKRIRNVKIITLKSKLVSDFRKDFGLYKVREINDYHHAHDAYLNAVVGTALLKKYPKLEPEFVYGDYKKYDLRKLIAKSDKERGKATAKMFFYSNIMNFFKTEVKLANGTIIKRPLIETNKETGEIVWDKEKDFATVRKVLSYPQVNIVKKTEVQTGGFSKESILPKGNSDKLIPRKNNWDPKKYGGFDSPTVAYSVLVVAKVEKGKAKKLKTVKELVGITIMERSAFEKNPIAFLEAKGYQDIQENLIIKLPKYSLFELENGRRRLLASAKELQKGNEMVLPAHLVTFLYHASRIDKSTGSSENLEQKQEYVEQHRHEFDEILDYIIDFSERYILADKNLEKIKNLYNENDDSDINELASSFINLFTFTSLGAPAAFKFFDATIDRKRYTSTKEVLNATLIHQSITGLYETRIDLSQLGGD

SEQ ID NO: 212 - protein, 1368 aa, Artificial Sequence
  1368 residue - joint ancestral sequence reconstruction method - node 93
MKKPYSIGLDIGTNSVGWAVITDDYKVPAKKMKVLGNTDRQSIKKNLIGALLFDSGETAEATRLKRTARRRYTRRKNRICYLQEIFSNEMAKVDDSFFHRLEESFLVEEDKKHERHPIFGNLADEVAYHENYPTIYHLRKKLADSTEKADLRLIYLALAHIIKFRGHFLIEGDLNAENTDVQKLFHQLVDTYNQLFEEDPLDTETIDAKAILTAKISKSRRLENLISQIPGQKKNGLFGNLIALSLGLTPNFKSNFDLSEDAKLQLSKDTYDEDLDNLLAQIGDQYADLFLAAKNLSDAILLSDILTVNDENTKAPLSASMIKRYEEHQQDLALLKQLVKEQLPEKYKEIFSDKSKNGYAGYIDGKTSQEDFYKYIKPILEKLDGAEEFLAKINREDFLRKQRTFDNGSIPHQIHLGELHAILRRQEEYYPFLKDNQEKIEKILTFRIPYYVGPLARGNSRFAWLTRKSDEAITPWNFEEVVDKEASAQAFIERMTNFDEYLPNEKVLPKHSLLYEYFTVYNELTKVKYVTEGMTKPEFLSAEQKQAIVDLLFKKNRKVTVKQLKEDYFKKIECFDSVDISGVEDRFNASLGTYHDLLKIIKDKDFLDNEENEDILEDIVLTLTLFEDREMIEKRLATYADLFDKNVLKQLKRRHYTGWGRLSRKLINGIRDKQSGKTILDFLKADGFANRNFMQLINDDSLSFKEEIQKAQVSGQTDSLNEQIADLAGSPAIKKGILQTIKIVDELVKVMGGHNPENIVIEMARENQTTNQGIKNSRERMKRIEEVLKKLGSQILKEHPVENTQLQNERLYLYYLQNGKDMYTGQELDINNLSQYDIDHIIPQSFIKDDSIDNKVLTRSEENRGKSDNVPSIEVVKKMKSYWQKLLNAKLISQRKFDNLTKAERGGLSESDKAGFIKRQLVETRQITKHVAQILDSRFNTERDENDKPIRNVKVITLKSKLVSDFRKDFGLYKVREINDYHHAHDAYLNAVVGTALLKKYPKLESEFVYGDYKKYDLRKMIAKSDKERGKATAKMFFYSNIMNFFKTEVKLANGTIIKRPLIETNKETGEIVWDKEKDFATVRKVLSMPQVNIVKKTEVQTGGFSKESILPKGNSDKLIPRKNNWDPKKYGGFDSPTVAYSVLVVAKVEKGKAKKLKTVKELVGITIMERSAFEKNPIAFLEAKGYQDIQENLIIKLPKYSLFELENGRRRLLASATELQKGNEMVLPAHLVTFLYHASKIDKSTGSSENLEQKQEYVEQHRHEFDEILDYIIDFSERYILADKNLEKIKNLFNENDDSDINELASSFINLFTFTSLGAPAAFKFLDATIDRKRYTSTKEVLNATLIHQSITGLYETRIDLSQLGGD

SEQ ID NO: 213 - protein, 1368 aa, Artificial Sequence
  1368 residue - joint ancestral sequence reconstruction method - node 94
MEKKYSIGLDIGTNSVGWAVITDDYKVPSKKFKVLGNTDRQSIKKNLIGALLFDSGETAEATRLKRTARRRYTRRKNRICYLQEIFSNEMAKVDDSFFHRLEESFLVEEDKKHERHPIFGNLADEVAYHENYPTIYHLRKKLADSTEKADLRLIYLALAHIIKFRGHFLIEGDLNAENSDVDKLFYQLVQTYNQLFEENPLDASGVDAKAILSARLSKSRRLENLIAQLPGEKKNGLFGNLIALSLGLTPNFKSNFDLAEDAKLQLSKDTYDDDLDNLLAQIGDQYADLFLAAKNLSDAILLSDILRVNSEITKAPLSASMIKRYDEHHQDLALLKALVRQQLPEKYKEIFSDQSKNGYAGYIDGGASQEEFYKFIKPILEKMDGAEELLAKLNREDLLRKQRTFDNGSIPHQIHLGELHAILRRQEEFYPFLKDNREKIEKILTFRIPYYVGPLARGNSRFAWLTRKSEEAITPWNFEEVVDKGASAQSFIERMTNFDENLPNEKVLPKHSLLYEYFTVYNELTKVKYVTEGMRKPEFLSGEQKKAIVDLLFKTNRKVTVKQLKEDYFKKIECFDSVEISGVEDRFNASLGTYHDLLKIIKDKDFLDNEENEDILEDIVLTLTLFEDREMIEERLKTYAHLFDDKVMKQLKRRHYTGWGRLSRKLINGIRDKQSGKTILDFLKSDGFANRNFMQLIHDDSLTFKEEIQKAQVSGQGDSLHEQIADLAGSPAIKKGILQTVKIVDELVKVMGRHKPENIVIEMARENQTTNKGLKNSRERMKRIEEGIKELGSQILKEHPVENTQLQNEKLYLYYLQNGRDMYVDQELDINRLSDYDVDHIVPQSFIKDDSIDNKVLTRSDENRGKSDNVPSEEVVKKMKNYWRQLLNAKLITQRKFDNLTKAERGGLSESDKAGFIKRQLVETRQITKHVAQILDSRMNTKRDENDKPIREVKVITLKSKLVSDFRKDFQLYKVREINNYHHAHDAYLNAVVGTALIKKYPKLESEFVYGDYKVYDVRKMIAKSEQEIGKATAKRFFYSNIMNFFKTEVKLANGEIRKRPLIETNGETGEIVWDKEKDFATVRKVLSMPQVNIVKKTEVQTGGFSKESILPKRNSDKLIPRKKDWDPKKYGGFDSPTVAYSVLVVAKVEKGKAKKLKSVKELVGITIMERSSFEKNPIDFLEAKGYKDIQKDLIIKLPKYSLFELENGRRRMLASATELQKGNEMVLPAHLVTFLYHASKIEKSTGSSENLEQKQAYVEQHRHEFDEILEYIIDFSERYILADKNLSKVKSLFNEHEDSDISELASSFINLFTFTSLGAPAAFKFLDTTIDRKRYTSTKEVLDATLIHQSITGLYETRIDLSQLGGD

SEQ ID NO: 214 - protein, 1368 aa, Artificial Sequence
  1368 residue - joint ancestral sequence reconstruction method - node 95
MDKKYSIGLDIGTNSVGWAVITDDYKVPSKKFKVLGNTDRHSIKKNLIGALLFDSGETAEATRLKRTARRRYTRRKNRICYLQEIFSNEMAKVDDSFFHRLEESFLVEEDKKHERHPIFGNIVDEVAYHEKYPTIYHLRKKLADSTDKADLRLIYLALAHMIKFRGHFLIEGDLNPDNSDVDKLFIQLVQTYNQLFEENPINASGVDAKAILSARLSKSRRLENLIAQLPGEKKNGLFGNLIALSLGLTPNFKSNFDLAEDAKLQLSKDTYDDDLDNLLAQIGDQYADLFLAAKNLSDAILLSDILRVNSEITKAPLSASMIKRYDEHHQDLTLLKALVRQQLPEKYKEIFFDQSKNGYAGYIDGGASQEEFYKFIKPILEKMDGTEELLAKLNREDLLRKQRTFDNGSIPHQIHLGELHAILRRQEDFYPFLKDNREKIEKILTFRIPYYVGPLARGNSRFAWMTRKSEETITPWNFEEVVDKGASAQSFIERMTNFDKNLPNEKVLPKHSLLYEYFTVYNELTKVKYVTEGMRKPAFLSGEQKKAIVDLLFKTNRKVTVKQLKEDYFKKIECFDSVEISGVEDRFNASLGTYHDLLKIIKDKDFLDNEENEDILEDIVLTLTLFEDREMIEERLKTYAHLFDDKVMKQLKRRHYTGWGRLSRKLINGIRDKQSGKTILDFLKSDGFANRNFMQLIHDDSLTFKEEIQKAQVSGQGDSLHEQIANLAGSPAIKKGILQTVKVVDELVKVMGRHKPENIVIEMARENQTTQKGQKNSRERMKRIEEGIKELGSQILKEHPVENTQLQNEKLYLYYLQNGRDMYVDQELDINRLSDYDVDHIVPQSFIKDDSIDNKVLTRSDKNRGKSDNVPSEEVVKKMKNYWRQLLNAKLITQRKFDNLTKAERGGLSELDKAGFIKRQLVETRQITKHVAQILDSRMNTKYDENDKLIREVKVITLKSKLVSDFRKDFQFYKVREINNYHHAHDAYLNAVVGTALIKKYPKLESEFVYGDYKVYDVRKMIAKSEQEIGKATAKRFFYSNIMNFFKTEITLANGEIRKRPLIETNGETGEIVWDKGRDFATVRKVLSMPQVNIVKKTEVQTGGFSKESILPKRNSDKLIARKKDWDPKKYGGFDSPTVAYSVLVVAKVEKGKAKKLKSVKELVGITIMERSSFEKNPIDFLEAKGYKDVQKDLIIKLPKYSLFELENGRRRMLASAGELQKGNEMVLPAKLVTFLYHASKIEKSKGSPENNEQKQAYVEQHRHDLDEILEYISEFSKRYILADKNLSKVKSLFNKHEDSSISELASSIINLFTLTSLGAPAAFKFLDTTIDRKRYTSTKEVLDATLIHQSITGLYETRIDLSQLGGD

SEQ ID NO: 215 - protein, 1368 aa, Artificial Sequence
  1368 residue - joint ancestral sequence reconstruction method - node 96
MKKPYSIGLDIGTNSVGWAVITDDYKVPAKKMKVLGNTDRQTIKKNLIGALLFDSGETAEATRLKRTARRRYTRRKNRICYLQEIFSNEMAKVDDSFFQRLEESFLVPEDKEHDRHPIFGNLADEVAYHKNYPTIYHLRKKLADSSQKADLRLIYLALAHIIKFRGHFLIEGDLNSENTDVQKLFHQLVDTYNLLFEEDPLDTETIDAKAILTAKISKSRRLENLISQIPGQKKNGLFGNLIALSLGLTPNFKTNFGLSEDAKLQLSKDTYEEDLDNLLAQIGDQYADLFLAAKNLSDAILLSDILTVSDENTKAPLSASMIKRYEEHQQDLALLKQLVKEQLPEKYKEIFSDKSKNGYAGYIDGKTSQEDFYKYIKPILSKLDGAEEFLAKIDREDFLRKQRTFDNGSIPHQIHLEELHAILRRQEEYYPFLKDNQEKIEKLLTFRIPYYVGPLARGNSRFAWLKRKSDEAITPWNFEEVVDEEASAQAFIERMTNFDTYLPNEKVLPKHSLLYETFTVYNELTKVKYVTEGMTKPEFLSAEQKQAIVDLLFKKNRKVTVKQLKENYFKKIECFDSVDITGVEDRFNASLGTYHDLLKIIKDKDFLDNEENQDILEDIVLTLTLFEDRKMIEKRLAKYADLFDKSVLKKLKRRHYTGWGRLSRKLINGIRDKQSGKTILDFLKADGFANRNFMQLINDSSLSFKEEIQKAQVIGKTESLKEVVANLAGSPAIKKGILQTIKIVDELVKVMGGHNPENIVIEMARENQTTAQGIKNSRQRMKKLEEVLKKLGSNILKEHPVDNTQLQNDRLYLYYLQNGKDMYTGQDLDIDNLSQYDIDHIIPQSFIKDNSIDNKVLTSQEANRGKSDNVPSIEVVRKMKSYWQKLLKAGAISQRKFDNLTKAERGGLSESDKAGFIKRQLVETRQITKHVAQILDSRFNTELDENNKRIRNVKIITLKSKLVSDFRKDFGLYKVREINDYHHAHDAYLNAVVGTALLKKYPKLEPEFVYGDYKKYDLRKLIAKSDKERGKATAKMFFYSNIMNFFKTEVKLANGTIIKRPLIETNKETGEIVWDKEKDFATIRKVLSYPQVNIVKKTEVQTGGFSKESILPKGNSDKLIPRKNNWDPKKYGGFDSPTVAYSVLVVAKVEKGKAKKLKTVKELVGITIMERSAFEKNPIAFLEAKGYQDIQENLIIKLPKYSLFELENGRRRLLASAKELQKGNELVLPAHYVTFLYLASRYDKLTGSSEDLEQKKHFVEQHLHYFDEILDIIIDFSERYILADSNLEKIKNLYNENDDFSINEQASNMINLFTFTSLGAPAAFKFFDATIDRKRYTSTKEVLNATLIHQSITGLYETRIDLSQLGGD

SEQ ID NO: 216 - protein, 1368 aa, Artificial Sequence
  1368 residue - joint ancestral sequence reconstruction method - node 97
MRKPYSIGLDIGTNSVGWAVITDDYKVPAKKMKVLGNTDRQTIKKNLIGALLFDSGETAEATRLKRTARRRYTRRKNRICYLQNIFSNEMAKVDDAFFQRLSESFLVPEDKEFDRHPIFGNLKDEVAYHKNYPTIYHLRKKLADSDQKADLRLIYLALAHIIKFRGHFLIEGDLNSENTDVQKLFLQLVDTYNLLFEEDPIDTETIDAKAILTAKTSKSRRLENLISEIPGQKKNGLFGNLIALSLGLTPNFKTNFGLSEDAKLQISKDTYEEDLDNLLAQIGDQYADLFLAAKNLSDAILLSDILTVSDENTKAPLSASMIKRYEEHQQDLALLKKLVKEQLPEKYKEIFSNKEKNGYAGYIDGKTSQEDFYKYIKPILSKLDGAEEFLAKIDREDFLRKQRTFDNGSIPHQIHLKELHAILRRQEKYYPFLKDNQEKIEKLLTFRIPYYVGPLAKGNSSFAWLKRRSDESITPWNFEEVVDEEASAQAFIERMTNFDTYLPEEKVLPKHSPLYEMFTVYNELTKVKYVTEGMTKPEFLSAEQKEAIVDLLFKKNRKVTVKQLKENYFSKIECFDSVDITGVEDRFNASLGTYHDLLKIIKDKAFLDDEANQDILEDIVLTLTLFEDEKMIEKRLAKYADLFDKSVLKKLKKRHYTGWGRLSRKLINGIRDKQSGKTILDFLKADGFANRNFMQLINDSSLDFEKIIQNAQEKAKSESLKEAVANLAGSPAIKKGILQSIKIVDEIVKVMGGHNPDNIVIEMARENQTTAQGIKNSRQRLKKLEEVHKKTGSKILKEHSVSNTQLQNDRLYLYLLQDGKDMYTGQDLDIDNLSQYDIDHIIPQSFIKDNSIDNIVLTSQEANRGKSDNVPSIEVVRKMKSYWQKQLKSGAISQRKFDHLTKAERGGLSESDKAGFIKRQLVETRQITKHVAQILDSRFNSKLDENNKSNRNVKIITLKSKMVSDFRKDFGLYKLREVNDYHHAHDAYLNAVVGTALLKKYPKLEAEFVYGDYKHYDLAKLIAKSDSSLGKATAKMFFYSNIMNFFKKEVKLADGTIIKRPLIETNTETGEIVWDKVKDFKTIRKVLSYPQVNIVKKTEVQTGGFSKESILPKGNSDKLIPRKNNWDPKKYGGFDSPTIAYSVLVVAKVAKGKAQKLKTVKELVGITIMEQSEFEKDPIAFLEKKGYQDIQENLIIKLPKYSLFELENGRRRLLASAKELQKGNELALPAKYVKFLYLASRYDKLTGKSEDREQKKHFVEQHLHYFDEILDIIVDFSNRYILADSNLEKIKNLYNEKDDFSINEQASNMLNLFTFTSLGAPAAFKFFDATIDRKRYTSTNEVLNSTLIHQSITGLYETRIDLSKLGGD

SEQ ID NO: 217 - protein, 1368 aa, Artificial Sequence
  1368 residue - joint ancestral sequence reconstruction method - node 98
MRKPYSIGLDIGTNSVGWAVITDDYKVPAKKMKVLGNTDRQTIKKNLIGALLFDSGETAEATRLKRTARRRYTRRKNRIKYLQNIFSNEMSKVDSAFFQRLSESFLVPDDKEFDRHPIFGNLKDEVAYHKNYPTIYHLRKKLADSDQKADLRLIYLALAHIIKFRGHFLIEGDLDSENTDVHALFLKLVDTYNLLFEEDKIDTETIDAKAILTAKTSKSRRLENLIAEIPNQKKNTLFGNLISLSLGLTPNFKTNFELSEDAKLQISKDSYEEDLDNLLAQIGDQYADLFIAAKNLSDAILLSDILTVKGANTKAPLSASMVQRYEEHQQDLALLKKLVKEQLPEKYKEIFDNKEKNGYAGYIDGKTSQEDFYKYIKPILSKLDGAEKLISKLEREDFLRKQRTFDNGSIPHQIHLNELKAIIRRQEKYYPFLKDNQEKIEKLFTFRIPYYVGPLANGNSSFAWLKRRSNESITPWNFEEVVDQEASARAFIERMTNFDTYLPEEKVLPKHSPLYEMFTVYNELTKVKYQTEGMKKPEFLSSEEKEEIVNLLFKKERKVTVKQLKENYFSKIKCFDSVTISGVEDRFNASLGTYHDLLKIIKDKAFLDDEANQDILEDIVLTLTLFEDEKMIEKRLAKYADVFDKSVLKKLKKRHYTGWGRLSQKLINGIRDKQTGKTILDFLKDDGVANRNFMQLINDSSLDFAKIIKNAQEKTKSESLEETIANLAGSPAIKKGILQSIKIVDEIVKVMGGHNPDNIVIEMARENQSTAQGIKNSRQRLRKLEEVHKNTGSKILKEHNVSNTQLQSDRLYLYLLQDGKDMYTGKDLDFDNLSQYDIDHIIPQSFIKDNSIDNIVLTSQESNRGKSDNVPSIEIVNKMKSYWQKQLKSGAISQRKFDHLTKAERGGLSEFDKAGFIKRQLVETRQITKHVAQILDSRFNSNLDENSKSNRNVKIITLKSKMVSDFRKDFGFYKLREVNDYHHAHDAYLNAVVGTALLKKYPKLEAEFVYGDYKHYDLAKLIVKSDSSLGKATAKMFFYSNIMNFFKKEVKLADGTIITRPQIETNTETGEIVWDKVKDIKTIRKVLSYPQVNIVKKTEVQTGGFSKESILPKGDSDKLIPRKNNWDPKKYGGFDSPIIAYSVLVVAKVAKGKAQKLKTVKELVGITIMEQNEFEKDPIAFLEKKGYQDIQESLIIKLPKYSLFELENGRKRLLASAKELQKGNELALPNKYVKFLYLASRYTKFTGKEEDREKKRHFVESHLHYFDEIMDIIVDFSNRYILADSNLEKIQNLYNEKDNFSIEEQATNMLNLFTFTGLGAPAAFKFFNADIDRKRYTSTNEILNSTLIHQSITGLYETRIDLSKLGGD

SEQ ID NO: 218 - protein, 1368 aa, Artificial Sequence
  1368 residue - joint ancestral sequence reconstruction method - node 99
MKKPYSIGLDIGTNSVGWAVITDDYKVPAKKMKVLGNTDKQSIKKNLLGALLFDSGETAEDTRLKRTARRRYTRRRNRIRYLQEIFSEEMNKVDDSFFHRLDESFLVPEDKRGDRHPIFGNLAEEVAYHEQFPTIYHLRKHLADSSEKADLRLVYLALAHMIKFRGHFLIEGDLNAENTDVQKLFQDFVEVYDQTFEESHLSEQTIDVEEILTEKISKSRRLENLIKHFPNEKKNGLFGNLLALILGLQPNFKTNFDLSEDAKLQFSKDTYEEDLENLLGQIGDEYADLFLAAKNLYDAILLSGILTVTDNSTKAPLSASMIKRYEEHQKDLAQLKQFIKENLPDKYNEIFSDKSKNGYAGYIDGKTSQEDFYKYLKNILSKIDGSEYFLDKIDREDFLRKQRTFDNGSIPHQIHLQEMHAILRRQGEYYPFLKENQEKIEKILTFRIPYYVGPLARGNSRFAWLTRKSDEKITPWNFDEVVDKEKSAEAFINRMTNYDLYLPDEKVLPKHSLLYETFTVYNELTKVKYVTEQGKTREFFDANMKQEIFDHLFKENRKVTKKKLLDYLKKEFEEFRIVDLTGLDKEFNASLGTYHDLLKILKDKDFLDDEENEDILEDIVLTLTLFEDREMIRKRLEKYSDIFTKEQLKKLERRHYTGWGRLSAKLINGIRDKQSGKTILDYLIDDGSSNRNFMQLINDDALSFKEEIQKAQVIGETDNLKQVVQDLAGSPAIKKGILQSLKIVDELVKVMGGHNPENIVVEMARENQTTNQGRRNSQQRLKRLEDALKNLGSNILKEHPVDNQQLQNDRLFLYYLQNGKDMYTGEELDIDNLSQYDIDHIIPQAFIKDNSIDNRVLTSSAENRGKSDNVPSIEVVRKMKSFWQKLLNAGLISQRKFDNLTKAERGGLTEDDKAGFIKRQLVETRQITKHVAQILDARFNTERDENDKRIRNVKIITLKSNLVSQFRKEFELYKVREINDYHHAHDAYLNAVVGTALLKKYPKLEPEFVYGDYKKYNLRKLIAKSYRERGKATAKMFFYSNIMNFFKTEVKLADGTVIERPMIETNKETGEIVWDKEKDFATVRKVLSYPQVNIVKKVEVQTGGFSKESILPKGNSDKLIPRKIYWDPKKYGGFDSPTVAYSVLVVADIEKGKAKKLKTVKELVGITIMERSAFEKNPVAFLEKKGYQNIQENKIIKLPKYSLFELENGRRRLLASAKELQKGNEMVLPAHLVTLLYHAKRIDKSNGNPEHLEQKQEYVEKHRNEFKELLDYISDFSEKYILADKNLEKIKELYEENDDADINELASSFINLLTFTALGAPAAFKFFGENIDRKRYTSTKEVLNATLIHQSITGLYETRIDLSKLGED

SEQ ID NO: 219 - protein, 1368 aa, Artificial Sequence
  1368 residue - joint ancestral sequence reconstruction method - node 100
MKKPYSIGLDIGTNSVGWAVITDDYKVPAKKMKVLGNTDKQSIKKNLLGALLFDSGETAEATRLKRTARRRYTRRKNRLRYLQEIFSEEMNKVDDSFFHRLDESFLVPEDKRGDRHPIFGNIAEEVAYHQQFPTIYHLRKHLADSSEKADLRLVYLALAHMIKFRGHFLIEGDLNAENTDVQKLFADFVEVYDRTFEESHLSEITIDAEEILTEKISKSRRLENLIKHYPTEKKNTLFGNLIALALGLQPNFKTNFQLSEDAKLQFSKDTYEEDLEELLGKIGDEYADLFTAAKNLYDAILLSGILTVNDNSTKAPLSASMIKRYEEHQKDLAQLKEFIKENVPDQYNDIFKDKSKNGYAGYIENGVKQEDFYKYLKGILSKINGSEYFLDKIDREDFLRKQRTFDNGSIPHQIHLQEMHAILRRQGEYYPFLKENQEKIEKILTFRIPYYVGPLARKGSRFAWATYKSDEKITPWNFDEVVDKEKSAEKFITRMTSNDLYLPEEKVLPKHSLLYETFTVYNELTKVKYVNEQGKAKEFFDANMKQEIFDHVFKENRKVTKEKLLNYLKKEFEEFRIVDLTGLDKEFNASLGTYHDLKKILKDKSFLDDEANEDIIEDIILTLTLFEDREMIRKRLEKYSDIFTKEQLKKLERRHYTGWGRLSYKLINGIRNKESGKTILDYLIDDGSANRNFMQLINDDALSFKEEIQKAQVIGEVDNLAQVVHDLAGSPAIKKGILQSVKIVDELVKVMGGHNPENIVIEMARENQTTNRGRRNSQQRLKRLQDSLKNLGSNILKKKPVDNQQLQNDRLFLYYLQNGKDMYTGEELDIDNLSQYDIDHIIPQAFIKDNSIDNRVLTSSAENRGKSDNVPSIEVVRARKSFWVKLLKAGLISQRKFDNLTKAERGGLTEDDKAGFIKRQLVETRQITKHVAQILDARFNTERDENDKVIRNVKIITLKSNLVSQFRKEFELYKVREINDYHHAHDAYLNAVVGTALLKKYPKLAPEFVYGEYKKYNLRKLIAKSYRERGKATAKMFFYSNLMNFFKTEVKLADGTVIERPMIETNKETGEIVWDKQKDFATVRKVLSYPQVNIVKKVEVQTGGFSKESILPKGDSDKLIPRKIYWDPKKYGGFDSPTVAYSVLVVADIEKGKAKKLKTVKELVGITIMERSAFEKNPVAFLEKKGYHNIQEDKIIKLPKYSLFELENGRRRLLASAKELQKGNEMVLPAHLVTLLYHAKRIDKSNGNPEHLEQKQEYVEKHRNEFKELLDYISDFSEKYVLADKNLEKIKALYEENDDADIEEIASSFINLLTFTALGAPAAFKFFGENIDRKRYTSTKECLNATLIHQSITGLYETRIDLSKLGED

SEQ ID NO: 220 - protein, 1368 aa, Artificial Sequence
  1368 residue - joint ancestral sequence reconstruction method - node 101
MKKPYSIGLDIGTNSVGWAVITDDYKVPAKKMKVLGNTDKQSIKKNLLGALLFDSGETAEATRLKRTARRRYTRRKNRLRYLQEIFAEEMNKVDESFFQRLDESFLVDEDKRGDRHPIFGNIAEEVAYHQQFPTIYHLRKHLADSSEKADLRLVYLALAHMIKFRGHFLIEGDLNAENTDVQKLFADFVEVYDRTFEESHLSEITVDAASILTEKISKSRRLENLIKHYPTEKKNTLFGNLIALALGLQPNFKTNFQLSEDAKLQFSKDTYEEDLEELLGKIGDEYADLFTSAKNLYDAILLSGILTVDDNSTKAPLSASMIKRYEEHQKDLEKLKEFIKVNAPDQYNDIFKDKSKNGYAGYIENGVKQDEFYKYLKGILSKINGSEYFLDKIDREDFLRKQRTFDNGSIPHQIHLQEMHAILRRQGEYYPFLKENQDKIEKILTFRIPYYVGPLARKGSRFAWAEYKSDEKITPWNFDEVVDKEKSAEKFITRMTLNDLYLPEEKVLPKHSLLYETFTVYNELTKVKYVNEQGKAKEFFDANMKQEIFDHVFKENRKVTKEKLLNYLNKEFEEFRIVDLTGLDKEFNASLGTYHDLKKILKDKSFLDDKANEQIIEDIILTLTLFEDREMIRKRLQKYSDIFTKEQLKKLERRHYTGWGRLSYKLINGIRNKENNKTILDYLIDDGSANRNFMQLINDDALSFKEEIQKAQVIGDVDDIAQVVHDLPGSPAIKKGILQSVKIVDELVKVMGGHNPENIVIEMARENQTTNRGRRNSQQRLKRLQDSLKNLGSNINKKKPVENQQLQNDRLFLYYIQNGKDMYTGEELDIDNLSQYDIDHIIPQAFIKDNSIDNRVLTSSAENRGKSDNVPSIEVVRARKSFWVKLLKAGLISQRKFDNLTKAERGGLTEDDKAGFIKRQLVETRQITKHVAQILDARFNTERDENDKVIRNVKIITLKSNLVSQFRKEFELYKVREINDYHHAHDAYLNAVVGTALLKKYPKLAPEFVYGEYKKYNVRKLIAKSYRERGKATAKYFFYSNLMNFFKTEVKLADGTVIERPDIETNKETGEIVWNKQKDFEIVRKVLSYPQVNIVKKVEVQTGGFSKESILPKGDSDKLIPRKIYWDPKKYGGFDSPTVAYSVLVVADIEKGKAKKLKTVKELVGITIMERSAFEKNPVAFLEKKGYHNIQEDKIIKLPKYSLFELENGRRRLLASAKELQKGNEMVLPAHLVTLLYHAKRIDKSNGNPEHLEQKQEYVEKHRNEFKELLDYISDFSEKYVLADKNLEKIKALYEENDDASIEEIASSFINLLTFTALGAPAAFNFFGENIDRKRYTSTKECLNATLIHQSITGLYETRIDLSKLGED

SEQ ID NO: 221 - protein, 1368 aa, Artificial Sequence
  1368 residue - joint ancestral sequence reconstruction method - node 102
MNKPYSIGLDIGTNSVGWAVITDDYKVPAKKMKVLGNTDKQSIKKNLLGALLFDSGETAEATRLKRTARRRYTRRKNRLRYLQEIFAEEMNKVDESFFQRLDDSFLVDEDKRGERHPIFGNIAAEVKYHDEFPTIYHLRKHLADTSEKADLRLVYLALAHMIKFRGHFLIEGDLKAENTDVQALFKDFVEVYDKTIEESHLSEITVDALSILTEKVSKSRRLENLIAHYPTEKKNTLFGNLIALSLGLQPNFKTNFQLSEDAKLQFSKDTYEEDLEGLLGEVGDEYADLFASAKNLYDAILLSGILTVDDNSTKAPLSASMVKRYEEHQKDLKKLKDFIKVNAPDQYNAIFKDKNKKGYAGYIESGVKQDEFYKYLKGILLKINGSGDFLDKIDREDFLRKQRTFDNGSIPHQIHLQEMHAILRRQGEHYPFLKENQDKIEKILTFRIPYYVGPLARKGSRFAWAEYKADEKITPWNFDDILDKEKSAEKFITRMTLNDLYLPEEKVLPKHSLLYETFTVYNELTKVKYVNEQGEAKEFFDANMKQEIFDHVFKENRKVTKDKLLNYLNKEFEEFRIVNLTGLDKEFNSSLGTYHDLRKILKDKSFLDDKANEQIIEDIIQTLTLFEDREMIRQRLQKYSDIFTKAQLKKLERRHYTGWGRLSYKLINGIRNKENKKTILDYLIDDGYANRNFMQLINDDALSFKEEIAKAQIIGDVDDIANVVHDLPGSPAIKKGILQSVKIVDELVKVMGGHNPANIIIEMARENQTTDRGRRNSQQRLKLLQDSLKNLDNPVNIKNPVENQQLQNDRLFLYYIQNGKDMYTGETLDINNLSQYDIDHIIPQAFIKDNSLDNRVLTSSAENRGKSDNVPSIEVVRARKSFWVKLLKAGLISQRKFDNLTKAERGGLTEDDKAGFIKRQLVETRQITKHVAQILDARFNTEHDENKKVIRNVKIITLKSNLVSQFRKEFELYKVREINDYHHAHDAYLNAVVGTALLKKYPKLAPEFVYGEYKKYNVRKLIAKSYRERGKATAKYFFYSNLMNFFKKEVKLADGTVIERPDIETNKEDGEIAWNKQKDFKIVRKVLSYPQVNIVKKTEVQTGGFSKESILPKGDSDKLIPRKSYWDPKKYGGFDSPTVAYSVLVVADIEKGKSKKLKTVQELVGITIMERSAFEKNPVAFLEKKGYRNIREDKIIKLPKYSLFELENGRRRLLASAKELQKGNELVIPQRFTTLLYHAKRIDKSNGNPEHLEQKQEYVEKHRDEFKELLDYISDFSEKYVLADKNLEKIKALFAENDDASIEEIATSFISLLTFTALGAPAAFNFFGENIDRKRYTSTTECLNATLIHQSITGLYETRIDLSKLGED

SEQ ID NO: 222 - protein, 1368 aa, Artificial Sequence
  1368 residue - joint ancestral sequence reconstruction method - node 103
MKKSYSIGLDIGTNSVGWAVITDDYKVPAKKMKVLGNTDKKYIKKNLLGALLFDSGETAEATRLKRTARRRYTRRKNRLRYLQEIFAEEMAKVDESFFQRLDESFLTDDDKTFDSHPIFGNKAEEDAYHQKFPTIYHLRKHLADSSEKADLRLVYLALAHMIKFRGHFLIEGELNAENTDVQKLFADFVGVYDRTFDDSHLSEITVDAASILTEKISKSRRLENLIKHYPTEKKNTLFGNLIALALGLQPNFKTNFKLSEDAKLQFSKDTYEEDLEELLGKIGDDYADLFTSAKNLYDAILLSGILTVDDNSTKAPLSASMIKRYVEHHEDLEKLKEFIKVNKSDLYHDIFKDKTKNGYAGYIENGVKQDEFYKYLKGILSKINGSDYFLDKIEREDFLRKQRTFDNGSIPHQIHLQEMHAILRRQGDYYPFLKENQDKIEKILTFRIPYYVGPLARKDSRFAWAEYRSDEKITPWNFDEVVDKEKSAEKFITRMTLNDLYLPEEKVLPKHSHVYETFAVYNELTKIKYVNEQGKSSEFFDANMKQEIFDHVFKENRKVTKEKLLNYLNKEFEEFRINDLIGLDKEFNASLGTYHDLKKILKDKSFLDDKTNEQIIEDIILTLTLFEDRDMIHERLQKYSDIFTKQQLKKLERRHYTGWGRLSYKLINGIRNKENNKTILDYLIDDGSANRNFMQLINDDALSFKQIIQEAQVVGDVDDIEAVVHDLPGSPAIKKGILQSVKIVDELVKVMGGDNPDNIVIEMARENQTTNRGRSKSQQRLKRLQDSLKELGSNLNKKKPVENSHLQNDRLFLYYIQNGKDMYTGEELDIDHLSDYDIDHIIPQAFIKDNSIDNRVLTSSAKNRGKSDDVPSIEIVRARKSYWVKLYKSGLISKRKFDNLTKAERGGLTEADKAGFIKRQLVETRQITKHVAQILDARFNTERDENDKVIRDVKVITLKSNLVSQFRKEFKFYKVREINDYHHAHDAYLNAVVGTALLKKYPKLAPEFVYGEYKKYDVRKLIAKSHSEMGKATAKYFFYSNLMNFFKTEVKYADGKVIERPDIETNKDTGEIVWNKQKDFEIVRKVLSYPQVNIVKKVEVQTGGFSKESILPKGDSDKLIPRKVYWDTKKYGGFDSPTVAYSVLVVADVEKGKAKKLKTVKELVGISIMERSFFEENPVAFLEKKGYHNVQEDKLIKLPKYSLFEFEGGRRRLLASATELQKGNEMVLPAHLVELLYHAHRIDNFNGSTEHLEQKQKYVSEHKKEFEEVLSCVENFANLYVDVEKNLSKIRAAAESMDNFSIEEISSSFINLLTLTALGAPADFNFLGEKIPRKRYTSTKECLNATLIHQSITGLYETRIDLSKLGEE

SEQ ID NO: 223 - protein, 1368 aa, Artificial Sequence
  1368 residue - joint ancestral sequence reconstruction method - node 104
MEKSYSIGLDIGTNSVGWAVITDDYKVPAKKMKVLGNTDKKYIKKNLLGALLFDSGETAEATRLKRTARRRYTRRKNRLRYLQEIFAKEMAKVDESFFQRLEESFLTDDDKTFDSHPIFGNKAEEDAYHQKFPTIYHLRKHLADSPEKADLRLVYLALAHMIKFRGHFLIEGELNAENTDVQKLFADFVGVYDRTFDDSHLSEITVDAASILTEKISKSRRLENLIKQYPTEKKNTLFGNLIALALGLQPNFKTNFKLSEDAKLQFSKDTYEEDLEELLGKIGDDYADLFTSAKNLYDAILLSGILTVDDNSTKAPLSASMIKRYVEHHEDLEKLKEFIKVNKLDLYHDIFKDKTKNGYAGYIENGVKQDEFYKYLKSILSKINGSDYFLDKIEREDFLRKQRTFDNGSIPHQIHLQEMHSILRRQGDYYPFLKENQAKIEKILTFRIPYYVGPLARKDSRFAWAKYHSDEPITPWNFDEVVDKEKSAEKFITRMTLNDLYLPEEKVLPKHSHVYETFAVYNELTKIKYVNEQGKSFEFFDANMKQEIFDHVFKENRKVTKAKLLSYLNNEFEEFRINDLIGLDKDFNASLGTYHDLKKILKDKSFLDDKTNEQIIEDIVLTLTLFEDRDMIHERLQKYSDIFTSQQLKKLERRHYTGWGRLSYKLINGIRNKENNKTILDFLIDDGHANRNFMQLINDDSLSFKTIIQEAQVVGDVDDIEAVVHDLPGSPAIKKGILQSVKIVDELVKVMGGDNPDNIVIEMARENQTTGYGRNKSNQRLKRLQDSLKEFGSDLSKKKPVENSHLQNDRLFLYYIQNGKDMYTGEELDIDHLSDYDIDHIIPQAFIKDNSIDNRVLTSSAKNRGKSDDVPSIEIVRNRKSYWYKLYKSGLISKRKFDNLTKAERGGLTEADKAGFIKRQLVETRQITKHVAQILDARFNTKRDENDKVIRDVKVITLKSNLVSQFRKEFKFYKVREINDYHHAHDAYLNAVVGTALLKKYPKLAPEFVYGEYKKYDVRKLIAKSHSEMGKATAKYFFYSNLMNFFKTEVKYADGRVFERPDIETNKADGEVVWNKQKDFDIVRKVLSYPQVNIVKKVEVQTGGFSKESILPKGDSDKLIPRKVYWDTKKYGGFDSPTVAYSVLVVADVEKGKAKKLKTVKELVGISIMERSFFEENPVSFLEKKGYHNVQEDKLIKLPKYSLFEFEGGRRRLLASATELQKGNEVVLPAHLVELLYHAHRIDNFNGSTEHLEQKQKYVSEHKKEFEEVLSCVENFANLYVDVEKNLSKIRAAAESMDNFSIEEISASFINLLTLTALGAPADFNFLGEKIPRKRYTSTKECLSATLIHQSVTGLYETRIDLSKLGEE

SEQ ID NO: 224 - protein, 1368 aa, Artificial Sequence
  1368 residue - joint ancestral sequence reconstruction method - node 105
TKKNYSIGLDIGTNSVGWAVITDDYKVPAKKMKVLGNTDKKYIKKNLLGALLFDSGETAEATRLKRTARRRYTRRKNRLRYLQEIFAEEMAKVDESFFQRLDESFLTDDDKTFDSHPIFGNKAEEDAYHQKFPTIYHLRKHLADSSEKADLRLVYLALAHMIKFRGHFLIEGELNAENTDVQKLFADFVGVYDRTFDDSHLSEITVDAASILTEKISKSRRLENLIKHYPTEKKNTLFGNLIALALGLQPNFKTNFKLSEDAKLQFSKDTYEEDLEELLGKIGDDYADLFTSAKNLYDAILLSGILTVDDNSTKAPLSASMIKRYVEHHEDLEKLKEFIKANKSELYHDIFKDKTKNGYAGYIENGVKQDEFYKYLKGILSKINGSDYFLDKIEREDFLRKQRTFDNGSIPHQIHLQEMHAILRRQGDYYPFLKENQDKIEKILTFRIPYYVGPLARKDSRFAWAEYRSDEKITPWNFDKVIDKEKSAEKFITRMTLNDLYLPEEKVLPKHSHVYETFAVYNELTKIKYVNEQGKDSEFFDSNMKQEIFDHVFKENRKVTKEKLLNYLNKEFPEYRIKDLIGLDKEFNASLGTYHDLKKILKDKSFLDDKVNEEVIEDIIKTLTLFEDRDMIHERLQKYSDIFTKQQLKKLERRHYTGWGRLSYKLINGIRNKENNKTILDYLIDDGSANRNFMQLINDDALSFKQIIQEAQVVGDVDDIEAVVHDLPGSPAIKKGILQSVKIVDELVKVMGGDNPDNIVIEMARENQTTNRGRSQSQQRLKKLQNSLKELGSNLNEEKPVENSHLQNDQLFLYYIQNGKDMYTGDELDIDHLSDYDIDHIIPQAFIKDDSIDNRVLTSSAKNRGKSDDVPSLDIVRARKAEWVRLYKSGLISKRKFDNLTKAERGGLTEADKAGFIKRQLVETRQITKHVAQILDARFNTERDENDKVIRDVKVITLKSNLVSQFRKEFKFYKVREINDYHHAHDAYLNAVVGTALLKKYPKLAPEFVYGEYKKYDVRKLIAKSHSEMGKATAKYFFYSNLMNFFKTVVKYADGKVIERPVIETNKDTGEIAWNKQTDFEKVRKVLSYPQVNIVKKVETQTGGFSKESILPKGDSDKLIPRKVYWDTKKYGGFDSPTVAYSVLVVADVEKGKAKKLKTVKELVGISIMERSFFEENPVEFLENKGYHNVQEDKLIKLPKYSLFEFEGGRRRLLASATELQKGNEMVLPAHLVELLYHAHRIDNFNGSTEHLEQKQKYVSEHKKEFEEVLSCVENFANLYVDVEKNLSKIRAAADSMDNFSIEEISNSFINLLTLTALGAPADFNFLGEKIPRKRYTSTKECLNATLIHQSITGLYETRIDLSKLGEE

SEQ ID NO: 225 - protein, 1368 aa, Artificial Sequence
  1368 residue - joint ancestral sequence reconstruction method - node 106
TKKNYSIGLDIGTNSVGWAVITDDYKVPAKKMKVLGNTDKKYIKKNLLGALLFDSGETAEATRLKRTARRRYTRRKNRLRYLQEIFAEEMAKVDESFFQRLDESFLTDDDKTFDSHPIFGNKAEEDAYHQKFPTIYHLRKHLADSSEKADLRLVYLALAHMIKFRGHFLIEGELNAENTDVQKIFADFVGVYDRTFDDSHLSEITVDAASILTEKISKSRRLENLIKYYPTEKKNTLFGNLIALALGLQPNFKTNFKLSEDAKLQFSKDTYEEDLEELLGKIGDDYADLFTSAKNLYDAILLSGILTVDDNSTKAPLSASMIKRYVEHHEDLEKLKEFIKANKSELYHDIFKDKTKNGYAGYIENGVKQDEFYKYLKNILSKIDGSDYFLDKIEREDFLRKQRTFDNGSIPHQIHLQEMHAILRRQGDYYPFLKENQDRIEKILTFRIPYYVGPLARKDSRFAWAEYRSDEKITPWNFDKVIDKEKSAEKFITRMTLNDLYLPEEKVLPKHSHVYETYAVYNELTKIKYVNEQGKDSEFFDSNMKQEIFDHVFKENRKVTKEKLLNYLNKEFPEYRIKDLIGLDKEFNASLGTYHDLKKILKDKAFLDDKVNEEVIEDIIKTLTLFEDKDMIHERLQKYSDIFTANQLKKLERRHYTGWGRLSYKLINGIRNKENNKTILDYLIDDGSANRNFMQLINDDTLPFKQIIQKSQVVGDVDDIEAVVHDLPGSPAIKKGILQSVKIVDELVKVMGGDNPDNIVIEMARENQTTNRGRSQSQQRLKKLQNSLKELGSNLNEEKPVENSHLQNDQLFLYYIQNGKDMYTGDELDIDHLSDYDIDHIIPQAFIKDDSIDNRVLTSSAKNRGKSDDVPSLDIVRARKAEWVRLYKSGLISKRKFDNLTKAERGGLTEADKAGFIKRQLVETRQITKHVAQILDARFNTERDENDKVIRDVKVITLKSNLVSQFRKDFEFYKVREINDYHHAHDAYLNAVVGTALLKKYPKLASEFVYGEYKKYDVRKLIAKSHSEMGKATAKYFFYSNLMNFFKTVVKYADGKVIERPVIETNKDTGEIAWNKQTDFEKVRKVLSYPQVNIVKKVETQTGGFSKESILPKGDSDKLIPRKVYWDTKKYGGFDSPTVAYSVFVVADVEKGKAKKLKTVKELVGISIMERSFFEENPVEFLENKGYHNIREDKLIKLPKYSLFEFEGGRRRLLASASELQKGNEMVLPGHLVELLYHAHRIDNFNGSTEYLEQKQNYVSEHKKEFEKVLSCVEDFANLYVDVEKNLSKIRAVADSMDNFSIEEISNSFINLLTLTALGAPADFNFLGEKIPRKRYTSTKECLNATLIHQSITGLYETRIDLSKLGEE

SEQ ID NO: 226 - protein, 1368 aa, Artificial Sequence
  1368 residue - joint ancestral sequence reconstruction method - node 107
MKKPYSIGLDIGTNSVGWAVITDDYKVPAKKMKVLGNTDKQYIKKNLLGALLFDSGNTAEDRRLKRTARRRYTRRRNRILYLQEIFSEEMNKVDDSFFHRLDDSFLVPEDKRGDRHPIFGNLAEEVAYHEQFPTIYHLRKHLADSSEKADLRLVYLALAHMIKFRGHFLIEGDLNAENTDVQKLFQDFVEVYDNTFEDSHLSEQNIDVEEILTEKISKSRRLERLLKHFPNEKKNGLFGNLLALILGLQPNFKTNFDLSEDAKLQFSKDTYEEDLENLLGQIGDEYADLFLAAKKLYDAILLSGILTVTDNSTKAPLSASMIKRYEEHQKDLAQLKQFIKQNLPDKYNEVFSDKSKDGYAGYIDGKTSQEDFYKYLKNLLSKIEGSEYFLDKIDREDFLRKQRTFDNGSIPHQIHLQEMHAILRRQGEYYPFLKENQEKIEKILTFRIPYYVGPLARGNSDFAWLTRKSDEKITPWNFDEVVDKESSAEAFINRMTNYDLYLPDEKVLPKHSLLYETFTVYNELTKVKYVTEQGKTREFFDANMKQEIFDHLFKENRKVTKKKLLDYLEKEFDEFRIVDLTGLDKEFNASLGTYHDLLKILKDKDFLDDEENEDILEDIVLTLTLFEDREMIRKRLEKYSDIFTKEQLKKLERRHYTGWGRLSAKLINGIRDKQSGKTILDYLIDDGSSNRNFMQLINDDALSFKEEIQKAQVIGETDNLKQVVQDLAGSPAIKKGILQSLKIVDELVKVMGGHNPENIVVEMARENQTTNQGRRNSQQRLKRLEDALKNLGSNILKEHPVDNQQLQNDRLFLYYLQNGKDMYTGEELDIDNLSQYDIDHIIPQAFIKDNSIDNRVLTSSAENRGKSDNVPSIEVVRKMKSFWQKLLNAKLISQRKFDNLTKAERGGLTEDDKAGFIKRQLVETRQITKHVARILDARFNTELDENDKRIRNVKIITLKSNLVSQFRKEFELYKVREINDYHHAHDAYLNAVVATALLKKYPKLEPEFVYGDYPKYNSRKLIAKSYRERKKATAKMFFYSNIMNFFKTEVKLADGTVIERPMIEVNKETGEIVWDKEKDFATVRKVLSYPQVNIVKKVEEQTGGFSKESILPKGNSDKLIPRKIYWDPKKYGGFDSPTVAYSVLVVADIEKGKAKKLKTVKELVGITIMERSAFEKNPVAFLERKGYQNIQENKIIKLPKYSLFELENGRRRLLASAKELQKGNEMVLPAHLVTLLYHAKRIHKVNGEPEHLEQKQEYVEKHRNEFKELLDYISDFSEKYILADKNLEKIKELYEENDDADINELASSFINLLTFTALGAPAAFKFFGKNIDRKRYTSTTEVLNATLIHQSITGLYETRIDLSKLGED

SEQ ID NO: 227 - protein, 1368 aa, Artificial Sequence
  1368 residue - joint ancestral sequence reconstruction method - node 108
MKKPYSIGLDIGTNSVGWAVITDDYKVPAKKMKVLGNTDKQYIKKNLLGALLFDSGNTAEDRRLKRTARRRYTRRRNRILYLQEIFSEEMNKVDDSFFHRLDDSFLVAEDKRGDRHPIFGNLAEEVAYHEQFPTIYHLRKHLADSSEKADLRLVYLALAHMIKFRGHFLIEGDLNAENTDVQKLFQDFVEVYDNTFEDSHLSEQNIDVEEILTEKISKSRRLERLLKHFPNEKKNGLFGNLLALILGLQPNFKTNFDLSEDAKLQFSKDTYEEDLENLLGQIGDEYADLFLAAKKLYDSILLSGILTVTDLSTKAPLSASMIQRYDEHQKDLAQLKQFIKQNLPDKYNEVFSDASKDGYAGYIDGKTSQEDFYKYLKNLLSKIEGSEYFLDKIDREDFLRKQRTFDNGSIPHQIHLQEMRAILRRQGEYYPFLKENQEKIEKILTFRIPYYVGPLARGNSDFAWLTRKSDEKITPWNFDEVVDKESSAEAFINRMTNYDLYLPDEKVLPKHSLLYEKFTVYNELTKVKYVTEQGKTREFFDANMKQEIFDGLFKENRKVTKKKLLDFLEKEFDEFRIVDLTGLDKEFNASYGTYHDLLKILKDKDFLDDSENEDILEDIVLTLTLFEDREMIRKRLEKYSDLFTKEQLKKLERRHYTGWGRLSAKLINGIRDKQSRKTILDYLIDDGSSNRNFMQLINDDALSFKEEIAKAQVIGETDNLKQVVQDLAGSPAIKKGILQSLKIVDELVKVMGGHNPENIVVEMARENQTTNQGRRNSQQRLKRLEDAIKNLGSNILKEHPVDNQQLQNDRLFLYYLQNGRDMYTGEELDIDNLSQYDIDHIIPQAFIKDNSIDNRVLTSSAENRGKSDNVPSIDVVRKMKSFWSKLLNAKLISQRKFDNLTKAERGGLTEDDKAGFIKRQLVETRQITKHVARILDERFNTELDENDKRIRKVKIVTLKSNLVSNFRKEFELYKVREINDYHHAHDAYLNAVVAKALLKKYPKLEPEFVYGDYPKYNSRKLIAKSYRERKKATAKMFFYSNIMNFFKTEVKLADGTVIERPMIEVNKETGEIVWDKEKHFATVRKVLSYPQVNIVKKVEEQTGGFSKESILPKGNSDKLIPRKIYWDPKKYGGFDSPTVAYSVLVVADIEKGKAKKLKTVKELVGITIMERSAFEKNPVAFLERKGYQNIQENKIIKLPKYSLFELENGRRRLLASAKELQKGNEMVLPAHLVTLLYHAKRIHKVNGEPEHLEQKQEYVEKHRNEFKELLDYISDFSEKYILADKNLEKIKELYEENDDADINELASSFINLLTFTALGAPAAFKFFDKNIDRKRYTSTTEVLNATLIHQSITGLYETRIDLSKLGED

SEQ ID NO: 228 - protein, 1368 aa, Artificial Sequence
  1368 residue - joint ancestral sequence reconstruction method - node 109
MKKPYSIGLDIGTNSVGWAVVTDDYKVPAKKMKVLGNTDKSHIKKNLLGALLFDSGNTAEDRRLKRTARRRYTRRRNRILYLQEIFSEEMGKVDDSFFHRLDDSFLVTEDKRGDRHPIFGNLAEEVAYHEKFPTIYHLRKHLADSTEKADLRLVYLALAHMIKFRGHFLIEGELNAENTDVQKLFQDFVGVYDNTFEDSHLSEQNVDVEEILTEKISKSRRLERLLKHFPNEKKNGLFGNLLALILGLQPNFKTNFELSEDAKLQFSKDTYEEELEVLLAQIGDNYAELFLSAKKLYDSILLSGILTVTDVSTKAPLSASMIQRYNEHQMDLAQLKQFIRQKLSDKYNEVFSDVSKDGYAGYIDGKTNQEAFYKYLKGLLNKIEGSGYFLDKIEREDFLRKQRTFDNGSIPHQIHLQEMRAIIRRQAEFYPFLADNQDRIEKILTFRIPYYVGPLARGKSDFAWLSRKSADKITPWNFDEIVDKESSAEAFINRMTNYDLYLPNQKVLPKHSLLYEKFTVYNELTKVKYKTEQGKTAEFFDANMKQEIFDGVFKVYRKVTKDKLMDFLEKEFDEFRIVDLTGLDKEFNASYGTYHDLRKILKDKDFLDNSKNEKILEDIVLTLTLFEDREMIRKRLENYSDLLTKEQLKKLERRHYTGWGRLSAELIHGIRNKESRKTILDYLIDDGNSNRNFMQLINDDALSFKEEIAKAQVIGETDNLNQVVSDIAGSPAIKKGILQSLKIVDELVKIMGGHQPENIVVEMARENQFTNQGRRNSQQRLKGLTDSIKEFGSQILKEHPVENSQLQNDRLFLYYLQNGRDMYTGEELDIDYLSQYDIDHIIPQAFIKDNSIDNRVLTSSKENRGKSDDVPSKDVVRKMKSYWSKLLSAKLITQRKFDNLTKAERGGLTDDDKAGFIKRQLVETRQITKHVARILDERFNTETDENNKKIRQVKIVTLKSNLVSNFRKEFELYKVREINDYHHAHDAYLNAVIGKALLGVYPQLEPEFVYGDYPHFHSRKLIAKSGHKENKATAKKFFYSNIMNFFKKDDVRTDGTVIERPMIEVNKKNGEIIWKKDEHISNIKKVLSYPQVNIVKKVEEQTGGFSKESILPKGNSDKLIPRKFYWDTKKYGGFDSPIVAYSILVIADIEKGKSKKLKTVKDLVGITIMERTTFEKNPVAFLERKGYRNVQEENIIKLPKYSLFELENGRRRLLASARELQKGNEIVLPNHLGTLLYHAKNIHKVDGEPKHLEQKQDYVEKHKDEFKELLDVVSNFSKKYILAESNLEKIKELYAQNNNEDIKELASSFINLLTFTAIGAPAAFKFFDKNIDRKRYTSTTEILNATLIHQSITGLYETRIDLSKLGGD

SEQ ID NO: 229 - protein, 1368 aa, Artificial Sequence
  1368 residue - joint ancestral sequence reconstruction method - node 110
MKKPYSIGLDIGTNSVGWAVITDDYKVPAKKMKVLGNTDKEYIKKNLLGALLFDSGNTAEDRRLKRTARRRYTRRRNRILYLQEIFSEEMNKVDDSFFHRLDDSFLVAEDKRGDRHPIFGNLAEEVAYHEQFPTIYHLRKHLADSSEKADLRLVYLALAHMIKFRGHFLIEDDLDVRNTDVQKLFQDFLEVYDSTFEDSHLSEQNIDVEEILTEKISKSRKLERLLAHFPNQKKNGLFGNLLALILGLQPNFKTNFDLSEDAKLQFSKDSYDEDLENLLGQIGDEYADLFLAAKKLYDSILLSGILTVTDLSTKAPLSASMIQRYDEHQKDLAQLKQFIKANLPDKYKEVFSDASKDGYAGYIDGKTSQEDFYKYLKNLLSKIEGSEYFLEKIDREDFLRKQRTFDNGSIPHQVHLAEMKAILRRQGEYYPFLKENQEKIEKILTFRIPYYVGPLARGNSDFAWLTRKSDEKITPWNFDEVVDKESSAEAFINRMTNNDLYLPDEKVLPKHSLLYEKFTVYNELTKVKYVTEQGETREFFDANMKQEIFDGLFKENRKVTKKKLLDFLEKEFDEFRIVDITGLDKEFNASYGTYHDLLKILKDKDFLDDSENEDILEDIVLTLTLFEDREMIKKRLEKYSDLFTKEQLKKLSRRHYTGWGRLSAKLINGIRDKQSRKTILDYLIDDGRSNRNFMQLINDDALSFKEEIAKAQVIGDSDNLKQVVQDLAGSPAIKKGILQSLKIVDELVKVMGGYNPEQIVVEMARENQTTNQGRRNSQQRLKRLEEAIKNLGSDILKEHPVDNQQLQNDRLFLYYLQNGRDMYTGETLDIDNLSQYDIDHIIPQAFIKDNSIDNRVLVSSAKNRGKSDNVPSIDVVKKMKSFWSKLLNAKLISQRKFDNLTKAERGGLTADDKAGFIKRQLVETRQITKHVARILDERFNTELDENDKRIRKVKIVTLKSNLVSNFRKEFEFYKVREINDYHHAHDAYLNAVVAKALLTKYPKLEPEFVYGDYPKYNSRKLIAKSYRERKSATEKMFFYSNIMNFFKTKVKLADGTVIERPMIEVNKETGEIVWDKEKHFATVRKVLSYPQVNIVKKVEEQTGGFSKESILPKGNSDKLIPRKIYLDPKKYGGFDSPTVAYSVLVVADIEKGKAKKLKTVKELLGITIMERSRFEKNPVAFLERKGYQNIQENKIIKLPKYSLFELENGRRRLLASAKELQKGNEMVLPAHLVKLLYHAKRINKVNGEPEHIEQKQEYVEKHRNEFKDLLHYISDFSEKYILADKNLEKINELYEENEDASVNELASSFINLLTFTALGAPAAFKFFDKNIDRKRYTSTTEVLNATLIHQSITGLYETRIDLSKLGED

SEQ ID NO: 230 - protein, 1368 aa, Artificial Sequence
  1368 residue - joint ancestral sequence reconstruction method - node 111
MKKPYSIGLDIGTNSVGWAVITDDYKVPAKKMKVLGNTDKEYIKKNLLGALLFDSGNTAEDRRLKRTARRRYTRRRNRILYLQEIFSEEMNKVDESFFHRLDDSFLVAEDKRGDRHPIFGNIADEVKYHEQFPTIYHLRKHLADSSEKADLRLVYLALAHMIKFRGHFLIDDPLDVRNTDSQKLFQEFLEAYDSTQEDSHLSEQKIDISDIITEKISKSRKVEALLAHFPNQKKNSFFGNLVSLVFGLMPNFKTNFDLSEDAKLQFSKDSYDEDLENLLGQIGDEYADVFVAAKKLYDSILLSGILTVNDLSTKAPLSASMIQRYDEHNKDLAQLKDFIKANLPDVFKEVFSDASKNGYAGYIDGKTSQEDFYKYLKNLLGKVDGSEYFIEKIDREDFLRKQRTFDNGSIPHQVHLAEMKAILRRQGEYYPFLKENAEKIQQILTFRIPYYVGPLARGNSDFAWASFNSDEKITPWNFDEVIDKSSSAQAFIERMTNNDLYLPDEKVLPKHSLLYEKFTVYNELTKVKYVTETGEAREFFDANLKQEIFDGLFKKNRKVTKKKLLDFLEKNFDEFRIVDITGLDKEFNASYGTYHDLLKILKDKEFMDDSENEDILEDIVLTLTLFEDREMIKQRLAKYADLFDKKVIDKLSRRHYTGWGRLSAKLINGIRDKQSRKTILDYLIDDGRSNRNFMQLINDDNLSFKDEIAKAQVIGDSDDLHQVVQDLAGSPAIKKGILQSLKIVDELVKVMGGYNPEQIVVEMARENQTTARGRRNSQQRLKRLEEAIKNLGSDILKEHPVDNQQLQNDRLFLYYLQNGRDMYTGETLDIDNLSQYDIDHIIPQAFIKDNSIDNRVLVSSAKNRGKSDNVPSNDVVKRMKSFWSKLLNAKLISQRKFDNLTKAERGGLTADDKAGFIKRQLVETRQITKHVARILDERFNREFDENDKRIRKVKIVTLKSNLVSNFRKEFEFYKVREINDYHHAHDAYLNAVVAKALLTKYPKLEPEFVYGEYPKYNSRKLIAKSYRERKSATEKMFFYSNIMNMFKTKVKLADGRVIERPMIEVNEETGEIAWDKTKHFATVKKVLSYPQVNIVKKVEEQTGGFSKESILPKGNSDKLIARKNYLDTQKYGGFDSPTVAYSVLVVADIEKGKAKKLKTVKELLGITIMERSRFENNSVAFLERKGYQNIQENKIIKLPKYSLFELENGRRRLLASAKELQKGNEMVLPAHLVKLLYHAKHINSVNGEPEHIEQKQNYVEKHRNEFKDLLHYIRDFSEKYILADKNLEKINELFEENEEDSVNELASSFINLLTFTALGAPAAFKFFDKNIDRKRYTSTTEVLSATLIHQSITGLYETRIDLSKLGED

SEQ ID NO: 231 - protein, 1368 aa, Artificial Sequence
  1368 residue - joint ancestral sequence reconstruction method - node 112
MKKPYSIGLDIGTNSVGWAVITDDYKVPAKKMKVLGNTDKEYIKKNLLGALLFDSGETAEATRMKRTARRRYTRRRNRILYLQEIFSEEMNKVDESFFHRLDDSFLVAEDKRGERHPIFGNIADEVKYHEEFPTIYHLRKHLADSSEKADLRLVYLALAHIIKYRGHFLIDEPIDIRNTDSQKLFQEFLEAYDSIQEDSHLSEQKTDISDIITAKISKSRKVEALLAQFPNQKKNSFFGNLVSLVFGLMPNFKSNFDLSEDAKLQFSKDSYDEDLENLLGMIGDEYADVFVAAKKLYDSILLSGILTTNDLSTKAPLSASMIERYDEHNKDKQLLKDFIRANIGDVFKEVFYDASKNGYAGYIDGKTSQEDFYKYLKNLLGKVDGSEYFIEKIDREDFLRKQRTFDNGSIPHQVHLAEMKAILRRQGEFYPFLKENAEKIQQILTFRIPYYVGPLARGNSRFAWASFNSNEKITPWNFDDVIDKSSSAQAFIERMTNNDLYLPDEKVLPKHSLLYEKFTVYNELTKVKYVTETGEAREFFDANLKKEIFDGLFKKNRKVTKKKLLDFLEKNFDEFRIVDITGLDNEFNASYGTYHDLLKILKDKEFMDDSENEDILEDIVLTLTLFEDREMIKQRLLKYEDLFDKKVIDKLSRRHYTGWGRLSAKLINGIKDKQSRKTILDYLIDDGHSNRNFMQLINDDNLSFKDEIAKAQVIGDGDDLHQVVQELAGSPAIKKGILQSLKIVDELVKVMGGYNPEQIVVEMARENQTTARGRRNSQQRLGRLKEAIQDLGSDILKEHPVENNQLQNDRLYLYYLQNGRDMYTGETLDIDNLSQYDIDHIIPQAFIKDNSLDNRVLVSSAKNRGKSDNVPSNDVVKRMKSFWSKLLNAKLISQRKFDNLTKAERGGLSADDKAGFIKRQLVETRQITKHVARILDERFNREFDENDKRIRKVKIVTLKSNLVSNFRKEFEFYKVREINNYHHAHDAYLNAVVAKALLTRYPKLEPEFVYGEYPKYNSRKLIAKSYRERKSATEKMFFYSNIMNMFKTTIKLADGRVIERPMIEANEETGEIAWDKTKHFATVKKVLSYPQVNIVKKVEEQTGGFSKESILPKGNSDKLIARKNYLNTQKYGGFDSPTVAYSVLFVADIEKGKSKKLKTVKEMIGITIMERSRFESNSVAFLEEKGYQNIRENTIIKLPKYSLFELENGRRRLLASAKELQKGNEMVLPAHLVKLLYHAKHINSVNGKPEHIEQKQNYVEKHRNEFTDLLHHIRDFSEKNILAAKNLEKINEAFEENEEDSVNELAQSFISLLTFTALGAPAAFKFFDKNIDRKRYTSTTEVLSATLIHQSITGLYETRIDLSKLGEE

SEQ ID NO: 232 - protein, 1368 aa, Artificial Sequence
  1368 residue - joint ancestral sequence reconstruction method - node 113
MKKPYSIGLDIGTNSVGWAVITDDYKVPSKKMKVLGNTDKRYIKKNLLGALLFDSGNTAEDRRLKRTARRRYTRRRNRILYLQEIFSEEMNKVDDSFFHRLDDSFLVPEDKRGSKHPIFGNLAEEKAYHKQFPTIYHLRKHLADSSEKADLRLVYLALAHMIKYRGHFLIEGDLNSENNDVQKLFQDFVEIYDNTFEGSHLSEQNADVEEILTEKISKSRRLERILKHFPNEKKNGLFGNFLALILGLQPNFKTNFDLSEDAKLQFSKDTYEEDLENLLGQIGDDYADLFLAAKKLYDAILLSGILTVTDNSTKAPLSASMIKRYEEHQKDLALLKQFIKQNLPDKYNEVFSDKSKDGYAGYIDGKTSQEDFYKYLKNLLSKIEGSDYFLDKIDREDFLRKQRTFDNGSIPHQIHLQEMHAILRRQGEYYPFLKENQEKIEKILTFRIPYYVGPLARGNSDFAWLTRKSDEKITPWNFDEVVDKESSAEAFINRMTNYDLYLPDEKVLPKHSLLYETFAVYNELTKVKFIAEGMRDYQFLDSGQKKEIVNHLFKEKRKVTEKDIIDYLENEIDEYDGVELKGLEKQFNASLSTYHDLLKILKDKEFLDDEENEDILEDIVLTLTLFEDREMIRKRLEKYSDIFTKEQLKKLERRHYTGWGRLSAKLINGIRDKQSGKTILDYLIDDGTSNRNFMQLINDDALSFKEEIQKAQVIGETDNLKQVVQDLAGSPAIKKGILQSLKIVDELVKVMGGHNPENIVVEMARENQTTNQGRRNSQQRYKRLEDALKNLGSNILKEHPTDNQQLQNDRLFLYYLQNGKDMYTGEELDIDQLSQYDIDHIIPQAFIKDNSIDNRVLTSSAENRGKSDNVPSIEVVRKRKSFWQQLLDSKLISQRKFDNLTKAERGGLTEEDKAGFIKRQLVETRQITKHVARILDARFNTELDENDKRIRNVKIITLKSNLVSQFRKEFELYKVREINDYHHAHDAYLNAVVATALLKKYPKLEPEFVYGDYPKYNSRKLIAKSYRERKKATEKVFFYSNIMNFFKKEVKYADGTVIERPMIEVNKETGEIVWDKEKDFATVRKVLSYPQVNIVKKVEEQTGGFSKESILPKGNSDKLIPRKIYLDPKKYGGFDSPTIAYSVLVIADIEKGKAKKLKTVKELVGITIMERAAFEKNPIAFLERKGYKNIQENNIIKLPKYSLFELENGRRRLLASAKELQKGNEMVLPAHLVTLLYHAKRIHKINGEPIHLEQKQEYVEKHRNEFKELLNYISDFSEKYILADKNLEKIKELYEENDDADINELASSFINLLTFTALGAPAAFKFLGKNIDRKRYTSTTEILNATLIHQSITGLYETRIDLSKLGED

SEQ ID NO: 233 - protein, 1368 aa, Artificial Sequence
  1368 residue - joint ancestral sequence reconstruction method - node 114
MKKPYSIGLDIGTNSVGWAVITDDYKVPSKKMKVLGNTDKRYIKKNLLGALLFDSGTTAEDRRLKRTARRRYTRRRNRILYLQEIFSEEMSKVDDSFFHRLDDSFLVPEDKRGSKYPIFGNLAEEKAYHKQFPTIYHLRKHLADSSEKADLRLVYLALAHMIKYRGHFLIEGDFNSKNNDIQKIFQDFVEIYDNTFEGSHLSEQNAQVEEILTDKISKSAKRERILKLFPNEKNNGLFSEFLKLIVGNQADFKKHFDLEEKAPLQFSKDTYDEDLENLLGQIGDDYADLFLAAKKLYDAILLSGILTVTDNSTKAPLSASMIKRYEEHQKDLALLKQFIKNNLPEKYNEVFSDKSKDGYAGYIDGKTSQEDFYKYLKNLLSKFEGADYFLDKIDREDFLRKQRTFDNGSIPHQIHLQEMHAILRRQGEYYPFLKENKEKIEKILTFRIPYYVGPLARGNSDFAWLTRKSDEKITPWNFEEVVDKESSAEAFINRMTNYDLYLPEEKVLPKHSLLYETFAVYNELTKVKFIAEGMRDYQFLDSGQKKEIVNHLFKEKRKVTEKDIIDYLHNEIDGYDGIELKGIEKQFNASLSTYHDLLKIIKDKEFLDDAENEAILEDIVHTLTIFEDREMIKQRLAKYDNIFDKEVLKKLTRRHYTGWGKLSAKLINGIRDKQSGNTILDYLIDDGTSNRNFMQLINDDALSFKEEIQKAQVIGETDNVKQVVQDLPGSPAIKKGILQSIKIVDELVKVMGGHNPESIVVEMARENQTTNQGKRNSQQRYKRLEDALKNLGSNILKENPTDNNQLQNDRLFLYYLQNGKDMYTGEELDIDQLSSYDIDHIIPQAFIKDNSIDNRVLTSSADNRGKSDNVPSIEVVRKRKSFWQQLLDSKLISQRKFDNLTKAERGGLTEEDKAGFIKRQLVETRQITKHVARILDARFNTELDENDKRIRTVKIITLKSNLVSQFRKEFELYKVREINDYHHAHDAYLNAVVATALLKKYPKLEPEFVYGDYPKYNSRKLIAKSYRERKKATEKVFFYSNIMNFFKKEVKYADGTVIERPMIEVNKETGEIVWNKEKDFATVRKVLSYPQVNIVKKVEEQTGGFSKESILPKGNSDKLIPRKIYLDPKKYGGFDSPTIAYSVLVIADIEKGKAKKLKTVKELVGITIMERAAFEKNPITFLEEKGYKNIQENNIIKLPKYSLFELENGRRRLLASAKELQKGNEIVLPAHLVTLLYHAKRIHKINGEPIHLEQKQEYVEKHRNEFKELLNYISEFSEKYILADKNLEKIKSLYEENEDADIDELASSFINLLTFTALGAPAAFKFLGKNIDRKRYTSTSEILNATLIHQSITGLYETRIDLSKLGED

SEQ ID NO: 234 - protein, 1368 aa, Artificial Sequence
  1368 residue - joint ancestral sequence reconstruction method - node 115
MTKPYSIGLDIGTNSVGWAVITDDYKVPSKKMKVLGNTSKKYIKKNLLGALLFDSGITAEGRRLKRTARRRYTRRRNRILYLQEIFSTEMATLDDAFFQRLDDSFLVPDDKRDSKYPIFGNLVEEKAYHDEFPTIYHLRKYLADSTKKADLRLVYLALAHMIKYRGHFLIEGEFNSKNNDIQKNFQDFLDTYNAIFESDLSLENSKQLEEIVKDKISKSAKKDRILKLFPGEKNSGIFSEFLKLIVGNQADFKKYFNLDEKAPLHFSKESYDEDLETLLGYIGDDYSDVFLKAKKLYDAILLSGILTVTDNGTEAPLSSAMIMRYKEHEEDLALLKAYIRNISLETYNEVFKDNSKNGYAGYIDGKTSQEDFYVYLKNLLSNFEGADYFLEKIDREDFLRKQRTFDNGSIPYQIHLQEMRAILDKQAKFYPFLAKNKERIEKILTFRIPYYVGPLARGNSDFAWSIRKRNEKITPWNFEDVIDKESSAEAFINRMTSFDLYLPEEKVLPKHSLLYETFNVYNELTKVRFIAESMRDYQFLDSKQKKDIVRLYFKDKRKVTDKDIIEYLHAEIDGYDGIELKGIEKQFNSSLSTYHDLLNIINDKEFLDDSSNEAIIEEIIHTLTIFEDREMIKQRLSKFENIFDKSVLKKLSRRHYTGWGKLSAKLINGIRDEKSGNTILDYLIDDGISNRNFMQLIHDDALSFKKKIQKAQIIGDKDNIKQVVQALPGSPAIKKGILQSIKIVDELVKVMGGRKPESIVVEMARENQYTNQGKSNSQQRLKRLEESLKELGSKILKENIIDNNALQNDRLYLYYLQNGKDMYTGEELDIDRLSNYDIDHIIPQAFLKDNSIDNKVLVSSASNRGKSDDVPSLEVVKKRKTLWYQLLKSKLISQRKFDNLTKAERGGLSREDKAGFIQRQLVETRQITKHVARLLDERFNNKKDENNKTVRTVKIITLKSSLVSQFRKDFELYKVREINDFHHAHDAYLNAVVASALLKKYPKLEPEFVYGDYPKYNSRKLIAKSFRERKSATEKVYFYSNIMNIFKKSISLADGTVIERPLIEVNEETGESVWNKESDLATVRKVLSYPQVNIVKKVEEQNHGLDRKGLFNANLSSKPKPNSEYLDPKKYGGYAGISNSFAVLVKGTIEKGAKKKITNVLEFQGISILDRITYRKDKLNFLLEKGYKDIEENLIIELPKYSLFELSDGSRRMLASIGEIHKGNQIFLSQKFVKLLYHAKRISNTIGNENHREQKQKYVENHKKEFEELFYYILEFNENYVGAKKNGELLKSAFQSWQNHSIDELCSSFIGLFELTSRGSAADFEFLGVKIPRYRYTPSSLLKDATLIHQSVTGLYETRIDLAKLGED

SEQ ID NO: 235 - protein, 1368 aa, Artificial Sequence
  1368 residue - joint ancestral sequence reconstruction method - node 116
MKKPYSIGLDIGTNSVGWAVITDDYKVPSKKMKVLGNTDKRFIKKNLIGALLFDEGTTAEDRRLKRTARRRYTRRKNRLRYLQEIFSEEMSKVDSSFFHRLDDSFLVPEDKRGSKYPIFATLAEEKEYHKQFPTIYHLRKHLADSKEKTDLRLIYLALAHMIKYRGHFLYEEAFDIKNNDIQKIFNEFISIYDNTFEGSSLSGQNAQVEAIFTDKISKSAKRERVLKLFPDEKSTGLFSEFLKLIVGNQADFKKHFDLEEKAPLQFSKDTYDEDLENLLGQIGDDFADLFLAAKKLYDAILLSGILTVTDPSTKAPLSASMIERYENHQKDLAALKQFIKNNLPEKYDEVFSDQSKDGYAGYIDGKTTQEAFYKYIKNLLSKFEGADYFLDKIEREDFLRKQRTFDNGSIPHQIHLQEMNAILRRQGEYYPFLKENKEKIEKILTFRIPYYVGPLARGNRDFAWLTRNSDEAIRPWNFEEIVDKASSAEDFINKMTNYDLYLPEEKVLPKHSLLYETFAVYNELTKVKFIAEGLRDYQFLDSGQKKQIVNQLFKEKRKVTEKDIIHYLHNEVDGYDGIELKGIEKQFNASLSTYHDLLKIIKDKEFMDDAKNEAILENIVHTLTIFEDREMIKQRLAQYDSLFDEKVIKALTRRHYTGWGKLSAKLINGIRDKQTGNTILDYLIDDGKSNRNFMQLINDDGLSFKEIIQKAQVIGKTDDVKQVVQELPGSPAIKKGILQSIKIVDELVKVMGGHNPESIVIEMARENQTTARGKKNSQQRYKRIEDALKNLASGILKENPTDNNQLQNDRLFLYYLQNGKDMYTGEALDINQLSSYDIDHIIPQAFIKDDSLDNRVLTSSKDNRGKSDNVPSIEVVQKRKAFWQQLLDSKLISERKFNNLTKAERGGLDERDKVGFIKRQLVETRQITKHVAQILDARFNTEVNEKDKKNRTVKIITLKSNLVSNFRKEFKLYKVREINDYHHAHDAYLNAVVAKAILKKYPKLEPEFVYGDYQKYDLKRYISRSPKEVEKATEKYFFYSNLLNFFKEEVHYADGTIVKRENIEYSKDTGEIAWNKEKDFATIKKVLSLPQVNIVKKTEEQTGGFSKESILPKGNSDKLIPRKISLDPKKYGGFDSPTIAYSVLVIADIEKGKAKKLKTVKELVGITIMEKAAFEENPITFLEEKGYKNIRKNNIIKLPKYSLFELENGRRRLLASAKELQKGNEIVLPVHLTTLLYHAKRIHKINGEPIHLEQKQEYVEKHRNEFKELLNLISEFSQKYILADNNLEKIKSLYEENEDADIDQLANSFINLLTFTALGAPAAFKFLGKDIDRKRYTSVSEILNATLIHQSITGLYETRIDLSKLGED

SEQ ID NO: 236 - protein, 1368 aa, Artificial Sequence
  1368 residue - joint ancestral sequence reconstruction method - node 117
MKKPYSIGLDIGTNSVGWAVITDDYKVPSKKMKVLGNTDKHFIKKNLIGALLFDEGTTAEDRRLKRTARRRYTRRKNRLRYLQEIFSEEMSKVDSSFFHRLDDSFLVPEDKRGSKYPIFATLAEEKEYHKKFPTIYHLRKHLADSKEKTDLRLIYLALAHMIKYRGHFLYEESFDIKNNDIQKIFNEFISIYDNTFEGSSLSGQNAQVEAIFTDKISKSAKRERVLKLFSDEKSTGLFSEFLKLIVGNQADFKKHFDLEEKAPLQFSKDTYDEDLENLLGQIGDDFADLFLVAKKLYDAILLSGILTVTDPSTKAPLSASMIERYENHQKDLAALKQFIKNNLPEKYDEVFSDQSKDGYAGYIDGKTTQEAFYKYIKNLLSKFEGADYFLDKIEREDFLRKQRTFDNGSIPHQIHLQEMNAILRRQGEHYPFLKENKEKIEKILTFRIPYYVGPLARGNRDFAWLTRNSDQAIRPWNFEEIVDKASSAEDFINKMTNYDLYLPEEKVLPKHSLLYETFAVYNELTKVKFIAEGLRDYQFLDSGQKKQIVNQLFKEKRKVTEKDIIHYLHNEVDGYDGIELKGIEKQFNASLSTYHDLLKIIKDKEFMDDAKNEAILENIIHTLTIFEDREMIKQRLAQYDSLFDEKVIKALTRRHYTGWGKLSAKLINGIRDKQTGNTILDYLIDDGDSNRNFMQLINDDGLSFKEIIQKAQVVGKTDDVKQVVQELPGSPAIKKGILQSIKIVDELVKVMGGHNPESIVIEMARENQTTARGKKNSQQRYKRIEDALKNLAPGILKENPTDNIQLQNDRLFLYYLQNGKDMYTGKALDINQLSSYDIDHIIPQAFIKDDSLDNRVLTSSKDNRGKSDNVPSIEVVQKRKAFWQQLLDSKLISERKFNNLTKAERGGLDERDKVGFIKRQLVETRQITKHVAQILDARFNTEVNEKDKKNRTVKIITLKSNLVSNFRKEFKLYKVREINDYHHAHDAYLNAVVAKAILKKYPKLEPEFVYGDYQKYDLKRYISRSPKDVEKATEKYFFYSNLLNFFKEEVHYADGTIVKRENIEYSNDTGEIAWNKEKDFATIKKVLSLPQVNIVKKTEEQTGGLFDNNIVSKKDASKLIPIKSSLSPEKYGGYARPTIAYSVLVIADIEKGKAKKLKRIKEMVGITIQDKKKFEANPITYLEERGYKNINSNLIIKLPKYSLFEFNDGQRRLLASSIELQKGNELILPYHLTALLYHAQRINKINGEPIHKEQKQQYVETHQNEFKELLTTIISLSKKYIQKPNVESLLQQAFEQNADKDIYQLSESFISLLKLTSFGAPGAFKFLGVEISQSRYKSVSQFLNATLIHQSITGLYETRIDLSKLGED

SEQ ID NO: 237 - DNA, 104 bp, Artificial Sequence
  gRNA1
gtcaggagactaggaaggagggttttagagctagaaatagcaagttaaaataaggctagtccgttatcaacttgaaaaagtggcaccgagtcggtgcttttttt

SEQ ID NO: 238 - DNA, 103 bp, Artificial Sequence
  gRNA2
gttaatgtggctctggttctgttttagagctagaaatagcaagttaaaataaggctagtccgttatcaacttgaaaaagtggcaccgagtcggtgcttttttt

SEQ ID NO: 239 - DNA, 103 bp, Artificial Sequence
  gRNA3
ggggccactagggacaggatgttttagagctagaaatagcaagttaaaataaggctagtccgttatcaacttgaaaaagtggcaccgagtcggtgcttttttt

SEQ ID NO: 240 - DNA, 29 bp, Artificial Sequence
  P5_2
aatgatacggcgaccaccgagatctacac

SEQ ID NO: 241 - DNA, 65 bp, Artificial Sequence
  P705
caagcagaagacggcatacgagataggagtccgtgactggagtcctctctatgggcagtcggtga

SEQ ID NO: 242 - DNA, 65 bp, Artificial Sequence
  P706
caagcagaagacggcatacgagatcatgcctagtgactggagtcctctctatgggcagtcggtga

SEQ ID NO: 243 - DNA, 65 bp, Artificial Sequence
  P707
caagcagaagacggcatacgagatgtagagaggtgactggagtcctctctatgggcagtcggtga

SEQ ID NO: 244 - DNA, 65 bp, Artificial Sequence
  P708
caagcagaagacggcatacgagatcctctctggtgactggagtcctctctatgggcagtcggtga

SEQ ID NO: 245 - DNA, 34 bp, Artificial Sequence
  Index1
atcaccgactgcccatagagaggactccagtcac

SEQ ID NO: 246 - DNA, 34 bp, Artificial Sequence
  Read2
gtgactggagtcctctctatgggcagtcggtgat

1-24. (canceled)

25. A Cas nuclease comprising or consisting of:
(i) the LFCA nuclease having the amino acid sequence set forth in SEQ ID NO: 1;
(ii) the LBCA nuclease having the amino acid sequence set forth in SEQ ID NO: 2;
(iii) the LSCA nuclease having the amino acid sequence set forth in SEQ ID NO: 3;
(iv) the LPCA nuclease having the amino acid sequence set forth in SEQ ID NO: 4;
(v) the LPDCA nuclease having the amino acid sequence set forth in SEQ ID NO: 5; or
(vi) a variant of the Cas nuclease according to any one of (i)-(v), wherein said variant shares:
at least 60% of sequence identity with the amino acid sequences of SEQ ID NO: 1, or
at least 75% of sequence identity with the amino acid sequences of SEQ ID NO: 2, or
at least 80% of sequence identity with the amino acid sequences of SEQ ID NO: 3, or
at least 85% of sequence identity with the amino acid sequences of SEQ ID NO: 4, or
at least 95% of sequence identity with the amino acid sequences of SEQ ID NO: 5, and
further wherein said variant retains one or several of the following distinguishing characteristics as compared to SpyCas9:
(a) a higher percentage of nicked DNA plasmid template and/or a lower percentage of linearized DNA plasmid template under conditions whereby SpyCas9 results in substantially exclusively linearized DNA plasmid template;
(b) a higher nick rate and/or a lower linearization rate on a DNA plasmid target under conditions whereby SpyCas9 results substantially exclusively in linearization (a ratio of linearized DNA plasmid target to nicked DNA plasmid template of at least about 4:1) while the variant provides observable nicked target;
(c) a relaxed PAM requirement comparable to any of LFCA, LBCA or LSCA;
(d) the ability to cleave single-stranded DNA; and
(e) the ability to use a sgRNA in which the targeting sequence is linked to a tracrRNA component, wherein said tracrRNA component is selectable from the tracrRNA components of Cas9 gRNAs employed by a plurality of existing bacterial species.

26. The Cas nuclease according to claim 25, wherein said Cas nuclease has been modified by catalytic site mutagenesis to retain only its nickase activity.

27. The Cas nuclease according to claim 25, wherein said Cas nuclease comprises one or several amino acid changes by way of substitution or deletion, whereby the endonuclease and/or nickase activity of the Cas nuclease is retained and whereby the relaxed PAM specificity of LFCA Cas is retained.

28. The Cas nuclease according to claim 25, wherein said Cas nuclease comprises one or several conservative substitutions, whereby the endonuclease and/or nickase activity of the Cas nuclease is retained and whereby the relaxed PAM specificity of LFCA Cas is retained.

29. The Cas nuclease according to claim 25, wherein said Cas nuclease has been modified by catalytic site mutagenesis to abolish its nuclease activity.

30. The Cas nuclease according to claim 25, wherein said Cas nuclease is linked or fused with a non-nuclease effector of genetic modification or regulation.

31. A method of modifying or regulating a target nucleic acid sequence, the method comprising contacting the target nucleic acid sequence with (i) a Cas nuclease according to claim 25, and (ii) a guide RNA, wherein said guide RNA targets the Cas nuclease to the target sequence, further wherein either:
(a) said contacting is in vitro with an isolated target nucleic acid or in a cell ex vivo, with the proviso that the method is not a method of modifying the germ line identity of a human being; or
(b) the method is not a method of medical treatment practiced on the human or animal body.

32. The method according to claim 31, wherein said target nucleic acid sequence is a target DNA sequence in ex vivo human or animal cells.

33. A method of phylogenetic ancestral reconstruction for obtaining a functional, single effector Cas protein nuclease comprising:
(a) providing a phylogenetic tree from sequence analysis of a population of Cas sequences comprising naturally-occurring single effector Cas nuclease sequences of the same classification type and derived from a plurality of existing species;
(b) selecting an ancestral variant sequence by tracing back an evolutionary route from the phylogenetic tree, wherein the highest probability amino acid for each amino acid of the selected ancestral variant is determined, and
(c) producing said variant, wherein said variant is capable of exhibiting Cas protein endonuclease and/or nickase activity.

34. The method according to claim 33, wherein step (b) comprises compiling sequences of ancestral variants which are each just ancestral variants for a plurality of species' sequences forming a proportion of the sequences of the same genus.

35. The method according to claim 34, further comprising using said sequences to compile one or more ancestor variant sequences which are assigned as a genus ancestor and/or one or more ancestor variant sequences which are assigned as a class ancestor able to trace back to sequences of starting species of a plurality of genera.

36. The method according to claim 35, further comprising compiling at least one inter-class ancestor sequence able to trace back to starting species of more than one class.

37. The method according to claim 33, wherein said selected ancestral variant sequence equates with an evolutionary period of at least 500 million years from the present.

38. The method according to claim 33, wherein said selected ancestral variant sequence is an ancestral variant of Cas9 sequences of existing bacterial species.

39. The method according to claim 38, wherein the starting population of Cas9 sequences comprises a plurality of bacterial Cas9 sequences selected from two or more of Streptococcus, Enterococcus, Listeria, Clostridium, Pelagirhabdus, Halolactibacillus, Floricoccus, Vagococcus, Urinacoccus, Vagococcus, Dorea, Ruminococcus, Lachnospira, Anaerostipes, Oisenella and Bifidobacterium.

40. The method according to claim 38, wherein the starting population of sequences spans more than one bacterial class.

41. The method according to claim 33, wherein the selected ancestral variant sequence is an inter-class ancestral variant sequence able to trace back to starting species of more than one class.

42. The method according to claim 33, wherein the selected ancestral variant is determined to be capable of exhibiting endonuclease double strand DNA cleavage and is further converted to either a nickase only or a deadCas with no nuclease activity and/or is linked with a non-nuclease effector, e.g., in a fusion protein.

43. The method according to claim 38, wherein the ancestral variant of Cas9 sequences has one or several of the following characteristics:
(a) a ratio of linearized DNA plasmid target to nicked DNA plasmid template of between at least about 2.3:1 to at least 1:4 under conditions whereby SpyCas9 results in a ratio of linearized DNA plasmid target to nicked DNA plasmid template of at least about 4:1;
(b) relaxed PAM requirement comparable to any of LFCA, LBCA or LSCA;
(c) ability to cleave single-stranded DNA;
(d) ability to use a sgRNA in which the targeting sequence is linked to a tracrRNA component, wherein said tracrRNA component is selectable from the tracrRNA components of Cas9 gRNAs employed by a plurality of existing bacterial species.

44. The method according to claim 43, wherein the selected ancestral variant is further converted to a variant which is either a nickase only or a deadCas with no nuclease activity and/or provides linkage with a non-nuclease effector, e.g., in a fusion protein.
